United States Patent Application Publication US 2025/0195589 A1 - sequence listing, part 14

SEQ ID NO: 23 - DNA, 2457645 bp, Lactobacillus crispatus
  source 1..2457645: mol_type = genomic DNA
ttgttcgacattaataaattttgggaacactttaatgacgagatgcgtgctcgtttcaacgaagttgcctacaatgcatggttcaaaaatactaaacctatttcatataatggaaaaacacatgaattaaaaattttagttcaaaatcctgtttctaaaggttactgggaaaagaatctatcttctcaattgattcaatctgcctacggttatgccgacatcgagatcttacctgtatttaaaatatctgaagatgcggatattacagaaaggatcgtaacacctgcgccaaagcgtgatgcgcaagttcaacagcctaatttgccagaaaaagaattcactaaagacttgaagttaaacgaaaaatacacttttgataacttcgttcaaggtgagggaaacaagttggccgccggtgctgcacttgctgtagccgacagtcctggtagtttttacaatcctttatttatttttggtggcgttggtttaggtaaaacacacctgatgcaagctgttgggcatcaaatgctagcagagcgacctaacgcaaaagttgtctatatacagagtgaaacttttgttaatgacttcattaattccatcaaaaataaaacgcaggacaaattccgcgaaaaatacagaacttgtgacctgcttttagttgatgatattcaattttttgccaaaaaagaggggattcaagaggaattcttccatacttttgagacactttataacgatcaaaaacagatcgtaatgactagcgatcggttgcctacagaaatcccagatctatcagagcgtttagtttctcgatttacatggggcttgcaagtcgaaattacgcctcccgatttggaaaccagaatcgctattttgcgacgcaaagctgaaacagaaggtttgactatcgatgatggtacgcttaactatattgcatctcaagttgatactaacattagagaacttgaaggggctttagttaaagttcaagcttatgccacaattgaaaaagcagatattgacgttaaccttgcgcgtgaagcattagttgacctcaaattagttcaaaaaaatcgtggattacaaatctctaaaatacaggaggttgtcgcaaactatttccaaacttcaactgctgaattaaagggtaaaaagcgtgtacggcagattgtagttcctcggcaaatagcaatgtatctttctcgtgaattaacagatgccagtttgccaaaaattggtcaagaatttgggggaaaagatcataccactgtcatgcatgcttatgataaaatcgacaagcagatgaaacttgattctgatatcaaaactgctgtctttgacctaaagcaaattttggagcactaaaagttatccactgtggaaaaataaacaagttttacacaagtttttaaccgtaacaagtccgttattttaggcttcttatgagttttcaacagaactcacaggccctactactactaattaattatataattactaataaagagaaatcacacagctattcttgggaggaaaaacatgaagtttacaattaatcgcaatctgtttatcgaaaacctcaataatgtaatgcgggccatctcatcaagagctactattccaattcttagtggaattaagttagacttaacagaagataaacttacgttaacgggtagtgatacagatatttcaattgaaattcaaattccagtcaatgatgatttaaatgtggaatctacaggttctattgttttaccagctagattctttagtgaaatcgtaaaaaaattacctggtaaagacttctcatttgaagtaaaagaaagttttcaaactcagatcatatctgaaaatagtgaatttacaattaatggtttagatgctaataactatccacgtttaccagaaattccagatgctgcttcattcactatttctggtaaaactttccgtgaaatcattaatgaaacgcaatttgctacttccaatgatcaaacacgagcaattttaactggggtacgtttcttctttagtccagataaaattaaagctgtcgcaactgattcccaccgtttatctcaaagaacaattgctttagaaaacggacctcaagctgaaactgatttgattattcctggtaaaagtttgcaggaattagctagaatcattggtgaagctgatccagaagttaaagtttgcccaggtgataaccaagctttatttgtaattggcaacttgtccttctattcacgtcttttggacggaaattatccagacactgatcgcttgattccgactgaaaagaccactagtgttgaatttgacatttccgaattatctagtgcccttgaacgtgccagtttgttaactcatgctggccgtaacaacgtggttactttgactttggatatagaaaatcaatcagctaagttatcaggtaaatctgcggaaattggtaatgttgaagaagatgttagcttcagaaatcttgaaggaaacaatttagagatttccttcaaccctgactatatgcgtgatgcgttaagagcttcagtaacagattctgtaattatgagttttactaagccacttcgtccatttatcattaatccagataaagaagacattgaatttgtgcaattaattacgccagttagaacatattaatcaagtacacaatatttgggtcataaaaagtcgtcaaataaggcgactttttattttgcttttaaacgaaaacgcaaaatattggcgtatatttatttttttaccgtgctagtgtgattaggttattttgaaaaaaagctctgaaaaggcttataagagcgatttagtttgttatttgtgttgaaaactaatataattatataggtataaagcgtattgaaggtgagcattattaagtattttaaagttgacggcgatcatattactttggggcaatttctgaaggaagagagcattatttcatcaggtggacaagctaaatggtacttaaaagataatccagtaactttaaatggtgaacttgaagatcgaagaggcaaaaagatgcatgttggtgatcacgtagtggttaatggccaagaatatgagtttcggtagggaagtcaatgtatcttgatcattttactgtacagaattttcgtaatttaaaaaagcttgacgtaaattttgattcaaacgtcaatatttttattggcaaaaatgctcagggcaagaccaatttgctagaggcaatctattttttagcattaacacgttcacataggaccaataatgataaagatttaattggtttcggcggtgagtttaccaatttacttgggcatgtacataaaagccaagtggatcttgatttacgtgttttgatcacccaaaaaggtaaaaaagtatggattaatcgagttgagcaggcgaagttgtctaaatacgtaggtcagctgaatgcgattttattttcaccggaagacctcgagttgatcaagggtgcaccagcactgcggcggagatttatggatcaagaatttggtcaaataaatgcagagtatttatacttcgcaagtaagtatcggcaagttttaattcaaaagaataattatctgaagcagctagctaaaggtaaggcaaaggatcaggtctttttagatgtactttcagatcaactagctggtatcgccgctgaagttgtctttcgacgatttaaatttcttaagtatcttagtcactatgctagcgatgcttatgcacatattagtttgggcagtgagcagctttcaattgcttatcatccatcagtggctgacatccaagctgatgacagtacagaagaaatttatcaaaagattttagcaagttatgcacgaaataaggcaagtgaaattcgcaaggggacaactacttctgggccgcaccgtgatgatattgaatttaaacttgatggtcaaaatgcacatctttatgcttcgcaagggcagcagcgttcaattgcacttagcgtcaagctggcggaaattcaattggtgcatcaactaacagatgagtatcctttactcttgctggatgatgtaatgagcgagttagatcatggtcgacaaagtgcgctacttaattatattcatgggaaaacgcaaacctttattactacgactgacttagaggggatttcctgggaaataattaaaaagccgcgtgtgtatcacattcaatcaagcaaaattagtttggagaaggagaattaaatggctgataattcaaaagaaaatcttgaaaaggtcaaaaaatatgaaaaagaggctgacaagtataatgccagtcaaattcaggttcttggcggtctagaagctgtacgtaagcggccaggtatgtatatcggttcgactagttctcagggattgcaccacttagtgtgggaaattattgataacagtattgatgaacgacttgctggttttgcgaccaagattgaagttacgattaacgaagatggtagtgtcaccgttcaagatgatggacgtgggattcctgtagatattcaagaaaaaacaggtcgtcctgcattagagactgtatttactgtacttcacgccggtggtaaattcggcggtggtggatataaggtttctggtggtttgcacggagttggggcttcagtagttaacgctctgtccactaaacttgatgttaccgtaatgcgtgatggcaaaaagtactttatcgatttcgatcatggccgtgttaaggatgagatgaaacaaattggcacggttccacttgatgaacatgggacgattgttcacttctatccagatccagatattttcacagaaactattgtttttgatgacaagatcttgaagaacagaatccatgaattggcctttttgaacaagggattaactttaacctttactgacaagcgtaaagacactgccgaaacagatgtgtataagtttgaaggtgggattaaggaatacgttgcctttttgaacaagggacaagaagtattatttgatgatccaatttatgttgaaagcacctataatggcattgatgttgaagtggctttgcaatatacaaatggctataagactactttgatgacttttgccaataatattcacacctatgaaggtgggatgcacgaggccggttttaagactgcgttaacacgtgtggttaatgactatgcacataagtctaagatcttgaaagataaggacgataatctttccggtgaagacattcgtgaaggaatgacagctattgtctcagttaagcaccctagtccgcaatttgaaggtcagactaagaccaagttaggtaattcggatgctagaactgctgtagataaggctttttcagaaacctttagtcgtttcttgatggaaaatccttcagttgggcgcaagattgtagaaaagggtcaattagccgaacgagctagaactgctgccaagcgtgcacgtgaagtaacaagaaagaaatctggtctggaaattgctaatttaccaggtaagttagccgacaatacaagtaacgatccaagtatttcagaactgtttatcgtcgagggtaactcagccggcggttctgctaagcaaggtagatcacgtttaacacaggctattttgccaatcagaggtaagattttaaatgttgaaaaagcttcgatggatcgaatcttggctaaccaagaaattagatctttattcacagctttaggaacaggctttggtgctgactttgacgtttcaaaagcacgttatcacaaattgattatcatgactgatgccgatgtcgatggtgcccacattagaaccctgctgttgaccttgttctataactatatgcgcccaatgatcgacaagggctatgtttatatcgccaagccacctctataccaagttcgtcaggggaaagtggtcagatatcttgatactgacgaagaattgcatgattacttaggtagcttgcaaccaagtcccaagcctactgtgcaacgttacaaggggttaggtgaaatggacccagagcagttgtgggaaactactatgaatccagaaaatagaagactggatcgggtaagtcctgagtatgctaaagatgctgacgcagtctttgagctcttaatgggaaatgaagtttcaccaagacgtgactttattcaaaagaatgctaaatatgttgaaaacttggatgcataggaggattagatggacgagaatcaaactcaagatcatagaattaaaaacgtcgatctaactagcatgatgcgtagttcatttttggattacgcaatgtcagttattgttgcacgtgctttacctgatgttcgtgatggcttaaagcccgtacaacgtcgtattctttacggtatgagcgagttgggtgtaacgcctgataaaccatacaagaagagtgccagaattgttggggaagttatgggtaagtttcacccccatggtgattcctcaatctatcttgctatggcacacatggcacaagatttctcataccgttacatgttagtcgatggtcacggtaacttcggttctgtcgatggtgatgagccagccgcaatgcgttataccgaagcaagaatgagtaaaattgctgtggaaatgttgcgcgatatcaacaaaaacaccattgattggcaaagaaactatgatgataccgaaaatgaaccggttgtcttacctgctagaattcctaacttgcttgttaacggtgctaacgggattgccgttgggatgacaacaaatatcccgccacataacttgactgaagttattagtggtttgcacatgttaatgaaaaatcctgatgctacaaccaaggacttgatgaaagttatcccaggtcccgattttccaactggcggaattattatgggacgtggtggtatctaccgtgcttatgagagtggtaagggtaacattgttgttcgcgccaaaaccaatattgagactgaaaagagcggccgcgagcgcataattgtgagcgaaattccatttatggtaaacaaggctgaattggtgaagaaaattgctgatttggctcgagaaaagactatcgatggaattactggtgtgcgtgatgaatcagaccagacagggatgcggattaccattgatattcgccgtgatgctagtgctagcgttgttttgaataatttattcaagcaaactcaaatgcaggctaactttggtatgaatatggtggctattgttgatggtgcgccacactttttaaccttgaagcaaatgctgcaatattacttggatcaccaagaagatgttgtaactcgcagaacaagattcgagttagctaaggcagaggcaagagcccacatccttgaagggttaagaatcgctctggacaatattgatgaaattgtccacattatccgcaatagtcaatcaagtgacattgctaaagcaactttgattagccgctttggccttgatgataagcaatctcaggctatcttagacatgcgtttggttcgcttgactggcttggagcgcgataaggtagaagctgaatacaaggaattacaagctaaaattgctgactacaaagatattttgtctaagcctgagagaattgaccaaattatctatgacgaattgcttgatattcaaaaacgattcggtgataagcgaagaaccgaaattggtgctagcgaagtcgtttcaattgaagatgaagatttgattgaaaagcaaaatattctgttgacggttacccataacggctatattaagagaatgccaattcaggaatttaagactcaaaaccgtggtggtaaaggtatcaagggaatgggtgtacaagatggcgactttattgagcatttgatttactcaagtacgcacgatctgctcttgttctttactaatgctggtaaggtttactccaagaaagcctatgagattcctgaatacggccgcgcagctaaaggattgccagtagtcaacttattgcaattggaaaagggcgaaaaggtccaaactgtaattaatattccggaaggtgctgacgataattacttattctttgttactaagatgggaactgtaaagcgtacacacgttagcgaattttctaatattagaaacagtggtttaattgccttaactttgaaagatggcgatgaattaagcaatgttttgactactgatggtaagcaaaacatcttaatcgggactcacttgggctacgctgttaccttcaatgaaggcgatgttcgggcaatgggtcgaactgctgctggtgttcgcggaattaacttgcgtgagcatgactatgttgttggttcaggtattttaggtgctgatgaccaagtcttggtaatttctgaaaagggttatggtaaacggactccagcttcagaatatccagttaaaggccgtggcggtaaaggtattaagactgccaatattactgagaagaatggtccattagctggtgtaacaatcattaactcaaataatgatgtgatggtaattactactgacggaattatgattcggtttagaattgatgatgtttcgcaaactggccgtagcaccatgggtgttcgcttgattaaagttagcgatgatagtcaggttgcaagtttaaccgttgttccaactgaggaagaacaagatcaaactggtgacgatgacgactcaaaaaatggataattaattaaaaaaacaaaaaatttgaacttttaaaaaaattatcaaacttttttgcgtaataaataatgagcagtaaaaaatctgctaggatcacgtgaaaacagtttggtaattttttatttatatgctaaaattagaaattgcgagtaatattccattactccttgttcttgattttagcaagaaccatatagtccagaaggaggtgcaatagtcatggcaactacaaagtacgaagtaacttacatcatcaagccagatgttgacgaagacaacaagaaggctcttgtagaaaactacgacaaggttatcgctgataacggtggtactatggtagaatccaaagactggggcaagcgtcgtttcgcatatgaaattgataagtatcgtgaaggtacttaccacattatgactttcactgctgacaacgctgacgcagttaacgaatttagccgtttgtcaaagattgacaacgctatcttacgttcaatgaccgttaagttagataagtaattttaatttattatccgttatgtgatttaggaaaggaaggtacatgagtatgattaatagagttgtacttgttggccgtttaacacgtgatcctgaattacgtactactgggagtggaatctcggttgctacgtttactcttgctgttgaccgtcaatttacaaatagccaaggtgagagaggcgcagatttcgtcagctgtgtaatttggagaaagtcagcagaaaacttctgcaactttacttcaaagggttcattagttggaattgatggccgaattcaaaccagaagttatgataataaagatgggcaaagggtatatgtaaccgaagttgttgttgataacttcgcattgctcgaatcacgcaaggatcgtgaagcccgcggtcaaaatggtggttatacaccaaatagtggaaatgctagcagtcaacctgctaacaatttcccaaataatggcggatcacaaggtaattcacagactaataacaatcaaaataattcacaagatccatttagtggctcaggtgatacgattgatatttctgatgacgatctaccattttaaactaaattaaagaaaggattctagaacatggctcaacaaagaagaggcggccgtcgtcgtcgtaaggttgactacatcgcagctaaccacatcgactacgttgactacaaagatgtcgatctgttgaaacgttttatctcagaaagaggtaagattttaccacgtcgtgttactggcactagtgctaagaaccaacgtaaagtagctaatgcaattaagagagctcgtatcatgggcttgttaccattcgttgctgaagactaatttagatcgaaataaaccaaaaggacaggacacaaggttctgtccttttttcgtataataattaaaaaaattctctcttcgtattgtacctactgttttcaatcatgagccggaataaggtataattaacactgatatactatatctattaggaaggatcttcatgaaggattttttacgtaagctagagttgcctgaatttattaaggattcacggctgacagcttctataatcattgcactttctctttcattattgggaagcattattgcgatgattatgaatccattgtttggtttggcaatgcttttagtctttattttgaccgttgcctttgccatctatgggacctatattttagcgggtaatgcaaatagctttgcggttaatttgtcttaccggataaagcgtagtgaacaagaagcaatgattaagatgccgttgggaattttgctttatgattcggatcaccaaattcagtgggttaatccatatctgcaattatatttaaagagtacagatttagtggggcacacaattgaatcagttgaccctgatctgaataagctacttaatgaagtaattgaggcaaaaacagcagaaaatcatctggttgattgggatggtcaccgatttgaaatggtggtccaaaataatttaggcgtaatatatttattggatattacgcgctatgccaaaattgaagataaatataaagctgaacgattggcgattggtcaaattttcatcgataattatgatgagctaagtgaagcaatgcatgatcaagaattgaccagcatgagttcatatgtgcaaaatacattgagtgattatgcgaaaaagtttaacgcatatttaaaacggattgatgaagaccatttcttgatcttgatccatatgcaagaattagctgagatggagaaggacaaattctctgttttagataaggtgcgtcaagaaacgagtagaaacaatacgccacttactttatctatgggaattgcttttgggagtgattctttgtctgaaattgccaaccaggctcaatctaacttggatttggccctaggtcgaggcggagaccaggttgtcttacgtcaacccggtaaagacgcccgcttttatggcggtaagtctaatccgatggaaaagcggactagagttagagcaagaatggtttcacaagcaattagtgaactatttaaagatgccgatcaagtttttgttgttggtcatcagcgtcctgacatggactcagtcggtagtgggattggcgtagtaaaattagctcgtcttcacggagttaaagctaattttgttttagatactaataagacaaactatgatgttggtcgcttggtcaccttaatgcaacagaaaaatcaggataaggatatttttattaaccctgatgtagctttagctcaagttactgacaagtcaatgttggtaatggttgatcattcgaagtattcaattacttactcacggtcactttatgatcgtttgaagaatcgaatcatcgttattgatcaccatagacgaggcgaggaattccctgaaaatccaatgttaacctatgttgaaccatatgcttcttcggcttgtgaattggtcactgaaatgattgaatatcagcagccagctaacggtaagcgagttttgaccgatattgaagctacagcaatgttagccgggattgtggtcgactccaaggaattctcgttgagaacaggaactagaaccttcgatgcggctagttacttacgttcaatcggggctgactcagcagttgtaagcatgctcttgaaagaggacattgatagtttcctcgaacggacgcatttagtagccactttgaagatggtgaagccacatatggccgtattatgtggacctgatgataagattatagatccgatcattacagcgcaggcggctgatactgcacttgatttggaaaatgtgggtgctagtttcgcaattacgcggcgcagtgataatacgattggtatttcagctagatcaatgggtaagatcaacgttcaaattattatggaaaaattgggcggtggtggacatctttctaatgcggcaacacagattaaagatgttactattgaagaagcaaaacaaaaattgcttgatgcaattgatgaatatgaaaaagaaaatgattaggaaggacaaatatgaaagttatttttactcaagatgttagaggtcgaggtaagcgtggacaagttaaggacgtacctgatggatacgcacaaaattacttgattaagcgaggcttggctaaagaagctactaaaggtaacatgaataccttgaagcgtgtagaagctaatgaaaaggctgcttatgaagcagaaaaggccgaagcagaaaagatcaaggcagaacttgaaaaagacgataccgttgttaacttcaaatctaaggctggtactgactcacgtttgtttggttcaatctcaagtaagaagattgtggaaggccttgaaaagcaatacggtatcaaggttgataaacgcaagcttaacttgccagaaccaattaagactttgggctatactaatgttcatgccaaattatttaagggtgtagaagctactattcgcgttcacgttactgaacaagactaataaaaagtggttgtgattgatggataatatcgtttctcaacaaattccgcatgatcgcgatgccgaaagggcagttctgggtgcgatttttatcgatcctgaagcaattgcggatgctagtgcggtagttcagcctgaagatttctatgagcgggctaatcaaattgtctttcaagcgatgttggacttgtctgatcgcggggatgcaattgatacgctgaccttgcaggatgaattaaacaaaagaaatcagttagaagatattggtggtatcggttatgtttctgaattagcgatggccacaccgacagcagcgcatgttacctattatgccaaaattgtgcataggaaggcgctgcttcgtcgtttaatctctgctagtcagaagattatctctaatgcaatcgatggctctgacgatgtaacagacattctagatgacgctgaaagtgaaatcatgaatgtctcgtcagagaatagcacaggcggctttaggaccattaaagagatcgttaattcagcgattaatgatattaataatattccggatgacggaaatatggttactggcttgccgactggttttgcggaattagataagatgacaactggttttcacgatgatgaattgatcattgtagctgctcgtcctggtgtgggtaagacttcatttgccttaaatattgcgcaaaatgtagggctacacactgaaaaaagtgtagctatgttctcactagaaatgagtggagagcaactggttcagaggatgttagcttctgaaggactgattaattcacagcacttgagaactggccagcttgatgaagaagaatggcgtaaattggtagtggcttctgggtcactagcaggtgcgcaaatctttatcgatgatacgcccggaatcaagatgagtgaaattcgtgctaaatcacggcgattagctaaggaaaagggcaatcttggtcttattgtaattgactacttgcagctgattgaagggccacgcagtgaatcacggcaacaagaagtttctgctatttcaagacagttaaaaaagctagctaaagagttgcacgtgcctgttattgccctttcgcagttatcacggtcagttgaacaaagacaagataaacggcctgtattatctgatattcgtgaatctgggtcaattgaacaggatgccgatattgtttctttcttgtatcgtgacgattattatcgtgatgaaccagatgatggtgaaagtagcggtagtcaagatgaagttggcgcagaagacgataatggtgaagtagaagtcatcattgaaaagaaccgttccggtagccgggggacggttaagctaatgttttcaaagccattcaaccgtttttcaaatttggattatgcgcatgatcctaatggtaattagaaaaagcactcgatgagtgctttttctatgtttgaatataatacgaataatatttacatttataatggaaattgtttatatttggtgttgaaatgataccataagtttgctataactattactgaaaagagtaataacgaatatactcatggaggaatagcaaatttatgaaatttaagaagattttggttggtgcttgcgccgtcttggcagctgtctcattagctgcttgctcaaatggtaagaagagttcatcttcatccagtgaacctaaggaattaaacgttgagtttgtgccaagtactcaagccaacaagatggaggctaaggctaagcctttaggtacgcttttacaaaagcaattgcatatcccagttcatgtgaccgtttctaccgactatagcggtctagttgaagcaatgtcatctaagaaagtagacgtcggcttcatgccaccatattcttacatattagctcataaaaagggaattgctgatgttttattgcaagccgaacgttacggctatgatgaaccatccggtaagatgaatcataccttaatgcataagtatcgtggtatgatcgtggttaagaagggctcaaagatcaaatcttggaaagacttaaagggtaaaaagattgcgattggcgatcctagttcttcatcgggctatgtttatccagttgcggaactttacaaaaagggtttgaatgtaaccaaggactgcaaattagttaatgttaagggtgacgatcaagaagtgttatccgttttgaatggggatgttgatgccgcattcgtcttctcagatgcacgtaatattgccgctaaggatgacaagaaagcaatgaccgatgttgtgccaatctactttaccaagtggattccaaacgatactattgcggttagaaaagatatgcctaaaaaattcagagttaagttagctaaggctttcaagaatattgctaagtctaagaagggtaagcaaattatcgaaagcatttataaccattatggttacgttgaagctaaggattctgactttgatggcttacgtcaataccaaaagatcgttaacaaagctactggtggcagtaactaaaatagaataatttaattgaaagggctcaccattacgggtgagttctttttgtttctatataatatatcagttaaaatagacataaaagaaatgaagaaagaagaaaaatatgaaaattgcggttttgactgatagctcggcttatttaactaaagaacaacaagaaaaatatcaaatcgatgttttgccaattccaattatttggggcaaaaaagtatatcatgacttagtcgatattggttatgaagaattttatcaaaaactaaatacagcaaaagagctgccaactacttcgcagccttcaatcggtgatcttaagcagaagattgatgaatacgtggcagcaggctacacggatgttattgtaattactctttcaagtgggatttctagctatttctcaaccgttcagagtgttgcggcagaagaagaccgaatcaaggttcatccattcgatagtaaaattacctgtgctggtgaggcggattatgctatgttggcaggccgtttaatcgaggctggagcggatattgatttgatcatgcatgatcttaaggacttgcaaaaaacaatggatgtgcgcttcatggtggacgatttgagccatttaaagcggactggacgtttatctaatgcggctagctttgttggtacgttgttcaagattaagccgattttatcgatggatgtgcaaaatgaaggccatatttcagcgattgcgaaagagcgtcaatataaacgtgcatacaagcatgtgcaaaatgattttgataatttgactaaaaatatgccgtataagattcaggacacaatttttgattcacttgatcctgagaaaaagcaagagtggctggaagattaccaagcaaagtttcctaagtataagttcgataccagcattatcggaccagttgttggcgtgcacgtgggacaaggaacaatgtcgatgatttggtgccgtgatttggatacttattttgatgaaaatggtcagccaatcaagggaattgagtcacaagcagtagtggatccagagtaagcataataccgatatggcaaaaaaatgagaggcactattgattttttaatatcattgctatattattattaataatttaatatggcgatgaatagggatgatcagagtgtcaatcagttctttttttaaaaagttaatagccaaaaataaactcttgtttttagctatggtgattactagtgcttttgcttctttagatggcgtcatttctccttatgttattgggaaaattactaatacactttctcagaaacattttagtgagataccgaaaatcttgttactgtatctgttgatgatgctttttctgaatgttagcttttatctatggcaattttgttggggaaaaattaccaaatcaagtaatgaattattgagatctacagcttttaatacttttattgcttcccctagtgaaaagaaaatcactaataccctgaattttatcaatgttaatgttaaacaaattgaaaatcaatgtattgattcaacaattatgcttgtttactgcgttgagcaagccatcgtttcattagtttatattttaagtattaatggcattgcagcaatggttttcttagtttgtgggttaattccatcagttattccacgtttaactcgtaattgggttcagacaggaactaaaaagtggaatagcagttatgaaaactataatcaaaaaacaagtgatgctgtgcatggtttcgatactatcagacatgcaaatggtgataatagattcaaaatatttgtccaaaaagcattaatgggagaagaaaagaagtattttttgatgaattttcggcgtaatacttctaattttttagcccaggtctcttattcattatcaatggttatttctttggctgttggtacattctttgtaattaatggtcaaattctagtaggtggtttgatttctctatttttagcatcagatcgtttaactagtccaattatttcgattgttaatattgcaaatcaattgacctctgttagtcctctgctaaaaaataaagctttacaaaaatctaaaaagcaagaatttaataatttagacttcaccaaattaccaaaccaagagaaaataatttttgatcactgcaatttagggtattctaataaagctattttgaagaatattaatttgacagtttctaaaggcaataaagtattgatcatcggtcgttctggtattggtaaatccactctgttcaagacattgcttaatgaaattccattgctaaagggcaaaatactggtggatgatagtcttaaccaagctaatttctataccaattttggtattgttagtcaggatacttatatattcgctgaatctttgcgctttaatttaacgcttggaaaagattttcctactcagcaagtaataaatgttttgaaaactgttaaattaagttatttagctaatgaaaaaagcttagacatgcagatcggggagaagggattatcactttcgggtggagaaaaacgaaaactggaaattgcacgagctttattgaatcaaaaatcgattttacttgttgacgaaggactatctggacttgatgaagaaagcaataaacaaatttttgcacttcttcaaagtcttccgcagacagtaattgaaattgaacatgctgttagtccagaagagaaaaatcaatttaatcaaattattgatctaggagctcagtattgatttttttataaataaacaaaaacaattacatacgtatgaaagcctttacacataaagacttttttatttataatattagcagcacgaaaactttttggagaaaaacttacatacagaaaaggatgagaatatggcagaaaagaaatatgtcggcagtatcgaagcaggcggtactaaatttatcgtagctgtgcaagatgttgaaacaggtaaggaagtagcgcgtgatcgtattcctaccactactaacaaggagactttacaaaagactgctgagtttttcaaaaagcaccccgttgatgcattaggaattggtacttttggtccaattgatatcaatcctaactctcggacttatggttacattttggacacgcctaagccaggttggtcaggtacggacgtaaagggcttttttgaaaaggaattaggtattccggttgccatgacaactgatgttaatgcatcatgttatggtgaatatgttgctcgcggccgcaatgattctaagagttacttctacgcaacggttggtactggcgttggcgctggaattgtacaagcaggtaagttgctcggccttaataatcacccagaaatgggccacatgttggttcgtcgttatcctggtgatgattatgagggtcactgtccattccataatgatgcttgtgtcgaaggcatgtctgctggtccaagtcttgagggcagaactggtatccctggtgaaaaattgtctcgcgataacaaggtcttcacttattctgcgtattacattgctcaaatgctcttcaatgtttacatggctgctcgtccagatgtaatgattgttggcggttcagttttaaatgaagatgatttggttaaggtaagaaagttctttgatgaatttaacaacaattacgttgccacacccgatttgaatgaattaattgtgcgtcctgctgtggctcacaacgggtctgcaactcttggcgattttgaattagctaagaatttgctcaaataaaaaagcatagataaattgaataagcaataaaaaggctcaactcgttaagaaagacgtaaggcgagccttttttgacgtaatttgacctaaatgcgcgtaatattaattctagaaacgtaaccggtttattaagaaaggagcccaactatgaacaaatcagatagtggcttaaaagacaaagttatcggtaaagtgaaagaagtcgaaggtaaaattaccggcgataaatcacgcgaagtccaaggaaaagctcaacaagccaagggcaaagttaaggacaaagccaaaaaattaaaagatgatctggaaaaagaccatcaaatagatgaagattgttaaagactcaggtcgactagcaatagctaaacagaaagcaaataggtgatcctatgttatcatggatctgggttttaatcgttggcgctataataggtctaatagctggtttcataaccggcaagggtggatcaatgggatttctagctaatttaatagcagggctggttggttcaaccttaggccaagcaatctttggttcgtgggggccgcaaatggctgggatggcaatcgtaccatcaatattgggagccgtcatcttggtactagtggtttcctttgtactagggatgcttagaaaaactgaataaaaatagaataagagaaaaaagacatgctgggcatgtctttttttgtgtttcatgtgaaactattttagcttttttcgttcattttctttctcagctaaaaaacgttgcttaatttcttcaggcaaaagactagggaccgtcttgtcataaaattcaaagaatatgggtgccttgttagagtcattgctcttgggatataaggcaaagtcactttcgctaaacggtaagctgatattaccacgtaaagcattgataatctcaccgaacatatgcaaaacataacggcgcgtctcaggctctaatgacatgattacgcgactgaaacggacagtgcctaataatttatgggcagtaatttgaaaaatatcggtaatatttaattcatcaaatgcttggaaaagagcatcccataatgcaccacgttgcttttcagggatgctgtggttaaagtcgatgaagaaatgccgcaaagaacgtgcacctgaagtaagtccttctgctagaacaaaactatcacggccaacagaccaacggcgtggatcatgttgctggaccatcggtgcagtgcttttgacgattaaaacgtgttcaggatgatcaagcatggtgccaatgattgaagcttctgggaggtaggtcttcatcttgggtaatgcacgtacaaagccaggtgctttccagacttggtggaaaaagccggggccgtcaaagctaaaggccttgataatgcggtcttgcaattttggctcggctacgcttaaagcatattcagcgtaattgccgcccttagaatgccctgctaaataaattttgtcatggggaaaggcggcagccatttctttgagataattggcagcaacatcttgaccataaactttgggcatgtagttcatattcatgtcttcgttccagccgatgattgagttgtcggttccgcggtaaacgatgataattgtattatcgtttaggcgaaaagtagccgcggtaaattgaagtggataaggatccttttccagccgattagtccaattaaggattttgatgtcgcctagacgaggtgatttaggtaaaagaagaatttgatcgccagctaaatctttcatttgaacttgaaatgaaggaaggacgtgtaatttttctgcgacttcacttaaggtatgttccttagcagatttgtcgacgggtaagtagatgattgaggcgaagagggatgcgtccacgctattaaaaggccgttctttaaaagaaagatctccccgccaacgtaaataatcaagtgttccagccataatctcatcctttcattaattaggcaatattactattttactaaattgtcgcgccaaaataaaaatctcaagctaatgcttgagatttaaaatgattttacataccaccacgggtatagctaatgcgagtaatatcaggatatttacgtagattcatgacaatagagttctcatcaatcttattattaatgattccgtcaacgtataaaacaatacggttatcactcacgtcgagaattttaacagtaacattttcgacgtgattatctgctagttcttgcctgattttagacaaaatgtggtgctggttaatagccacaatttgaatgttaaaacgaacatgtggcgttattttgttgataatgacatcatcgtgaaagatcatttgaatgataaacaatagggcggttgataggataccgatgaaatacatgccagcaccaacagccatcccgatggcggcagttgcccaaactccagcggcagtagttaagcctgagacctgttcttttctaactaggattgtacccgcaccaatgaaggaaattcctgtaacgatctgagccgcaattcttgatggatctagtgcaatgtcatgcatgcttaatagatcggtaaatccatatttagatacgatcatgaataaagcagaagcaatcgcaactacgatatgagttctcacacccgcgctttttctctgaatcgcccgctcatagccgattaatgcgccacaaaaagctgcgacaacaattctaagtagccaatctaattcggttgtaattggagttaaagtttgcattatttagtcctcatcctttgtataatcaacaattattatcatttctattttaacgtaaatgcagaaaaattatagtctggggaatttttttgaacttttttcaaaaaaagacttgcacagtttccatctatatggtttaataaatactgttgtcgggtaagacaacgaagagttgctgacttagctcagttggcagagcacctcactagtaatgaggaggtcggaggttcgaaccctctagtcagcattagttaaacaatttaatagtttttaagtctatcaattaagttcgaaagagcttgatatgataggcttttttgttgtttctagatatttgtgtagatttaaaaatagttatgaatatttagtttcaccacaaaaattgccacacagtttttctagtgtggcatctgtgtggcaaaggttcgattaatgttgtagtggcgggctttattgcttgccatttttttcgttttcaaagtatccatgatttaagaatgactgtcgatactcttttaagatttttatttgatggtctatggcaggaactaacgtatatgcattatttttattgtagaattcatccattaatttagtattcgattccttgtagtccttaatgaaattactatcattttgattcataataatttcttctaactgcatacgaataactaaattaacattattaatcatttcaagatcattggcaccttccaatgattcttcaaattttttatcaaataaaaatttgaatttatctttccaaaaatttattacgtatgatttctttttataatcttcatcatttttagtaaaagaatcagcggtatctttatctccatttatagaaagaaagtgagaaatattatttttcatattactcaattcttcattattatcataatatgctgaaaaaagtaaattaattaacttactctctacttcttcacctctaattccttcgccttttacataagatactggaactttaaatatttctgctaaagctttccatacctcttcatttggaattctgcttcctgcttcgtatcttgctattgttactcgtgtagctgatatgtttttgttctttaaaagattagatagatcttgttgtgtaaaataatttttttctcttagttctttaattcgatttggagtcatattattacctcactaagattaattttatacgattggtacataattagcaaaagtaccaattttggatacaaaagtgttgactacaagaatgaataattgtatattatatgtaaccaaatgtggtacacaaaattataaataaccatttttggaaacgaaaaagaaagagggaatattaaaaatgtccagtaatgtaacaaagcaaggtgaagtactatctaccttcaacgaaagtagtagtaaaagaaccccaattcaatcagcattaacaagaccgttggttgaagcaattggtaagtgttttctattgttgagcggaaccacagaagaagttcaagatcctaatgatgagtctaaaactattccgcgcgcagtatacgaagtaagagttattagctctaaaactagattacctattggaactgtgctaacggtgaaaattaaaggaggtaagagtgtaattactgatgaagagaataagaagttactgttaggcttagagaaaaataaggtagtagcattcgacgatctaagtcattggaactttaacggaaatgagggattatcagcttcaggtatgcgagtattagaagtcagtccgcaagaggctatgaatttatagaaatgaggcggcttatatgaaaataaaaaaattagtcttagataccaaaaacccgttaggcaatcctaacggggtaaaaatggcattaggagtaactttattatcttcaattggtcttgagtataaagttgcacctcaattcataaatgctggtaattataccgcattagcttatccatttttaattaatattatacctctagggtatccatgctggaaatgggttaatctccatatcgttaattataagatctataagcaattgatgaatattgttcattcggaacaattaatagactatggagataaaaaagaaactaccactttcggtgaaagaaaagttgaatatggtgtcaagatcgtctatgaagaaacggcagaaggtacatatattactgtatatcctaatggtataaaacatagcgacgccactcagacgctaaacaataggctagaggaaactttcaacatgaatgttttatcggtagatcatcagctagcttatacgaaatatttattgagaaatgtaaacagacaaagaatggaggtttctaatgataacttctaatttcgtaataaatcttgataagaatacatcattcagttttaaaggtagtggtgggattcttgtcactgggagaagtggctcaggcaagactaataccaccacatatataatgctgaaggcgatgtcccaatgtgattgcggtttatatattattgatgcaaaaagagctgatatgtatggacttcatcaatttttaaaagatggcaagaaggtagtggcaagtacaacaaatcaaatagcacgattgttgcgtgttcttaatgagaacatgagcgcacggtatgagcattttaagaatggaaaatggggacaggatttcgctgaatatggatatagaccatatttattagtcattgatgaagtatctgcgatgttggctggggctggtaagaataagaaagaaataatgggtgaattgcgtcaagttatccttcgtggacgacaagcagggatatttacccttatttcagggcagagaattgatgcaactattttagatcgtgatattaccttacagttaggtacaagaatcgtgatgggacaagcagattcggagacttatcgcatggcttacccaatggtaaatgatattaaagcattaccattagtacctaataagccggggtatggtcttatctattcagatgggcaaaaaattagcaatcctactccatttgtctcaccggatatgtctaacattgatgttccaggggtaattacgaggttagagaataattttgatccatctaaatatattgatgaatcaagctattgggaggtttagtaattgataagttgccagctggcgggcgacagagtcgcacgaatggaatgtccaagcgtgagcgggctggcaacacccaactaataatatgggtgtaacggaaagattattaatcatggaaacgatgaataatattaaaattgatcaacttcgtctaaatattccatatgatgaaatctatcaagtagaaaatagtcaaagtttacccaaagaagttatagtagctgataatctgctgcatctggcatggttgtttaagtctaatacagtgagtcatggacataatggctatacttcttcatataatttcggttcaggagaacaaggcggaaatatttccgtaatgtggaacgagtcaagaaaagatatgggaatactagtcgactttactgcgacaggcaaagcgctatatgaaagccttgctgaattacatggaattcctgttaattggaagaaaataattgaagaattatatgaaaaaatggggcatatatcgaggctagatatagctactgaccttattaattatggtttttcagttaacgaaattattcaaaggttaaagaatgaagaatcatttttcttgaatactcaaggaaataaaatcaatgctaatcgatttaagataattggaagctatagtgaagctcagactctatatatcggtagtagaaaaagtgatgcttttctgagaatttatgataaaaaagttgaacaggatcgagccgatggactctatagaaacttggctagaaactgtaacgattggataagagtagaagcagaatttaaacaccgtttagctaaagaactaggaaaatatattacaacattaactgcagataatatttatccttatttacttggctgtgtactagaacgttggtcattagttgatagggaagaataatgacatatgaaaaattccaatattctaaagaatggaagattttaaaagagttatcgaaaggacaaggacttcaagaactaaaacaagctcaagttgacgcttccctgaatagaaaaattaattggttcttgtatggtggtgccagtggagttattacgttgattaaagaaatttatggtgatgaagcactaaaaaagttttatcaatttttagattattttatttctaatcctgatacgttaggacattactaccactcggacaagataaaggcggatactaaaactattgcagattctacgcaaggcttgaactttggagaatatttagaagacttaaagagagaattagttgagggagataaacagaaaggcaggggctaatatgtttggcacagagttactcaacgctagacaaatagcagaagaattaggtattagctatacttacttttttaaattaattaaaaatgggtgtccttatcatcaacttggagaccaaggacgtaaatattacgttttaaaggaagtacaagagtggctattagtaagtagccaacattaattagaagacgtagcaacttgctacgcttttttaggagaaagctatgtcaattacacaaattaaaacggggaaaaataaaggaaaataccgtgttagaattcaacctactgataatgaaacaggtaaaactattccgattcctagtaaagtaacaaaaactagcagtaagcgtgaagcaaaacaattagaagaacaaatgtgggtgcaatatcgcgcgcataaagaaatgaatttaaatgtattagatcaaccacttgcaaaagctttagatcactatgtagaagaagaaagaagttcggggcgttggtcatcgattactacgtatgataattggaaatatacggttaagcttgtttctcaatatttcggaaagaaaaaagttaaagatatcaaagaaaaagatatgcgtagttttgctagaaattacataagtacacataaagcaactgtggcacctcattcaacgctagatagacagttacaaaatttaaggagttattttgctactttgaaggaatatggtgtcttaaagaatcctattcctatgaagccattaactaagttttttagacgtgatgaaatgaatgcccctgttaagaaatatgttttcactaataatgaaattaatgttcttaaagatagaatttatagagagcttggagtaacaagaataagttattggacaactagaattgctatcttgatagctctagatactggaatgagacctcaagaaattcaggctttaaagtggagtcaaattactaatgatggaagttttaaagtttttagaataaatgactcatggaatgaaaaagagaagcatcttaacggacatttgaaaagtcgaccgcatggagaatctagactaacccttcccctttctgaaccacttttgcagttattgaataagtttcgtcattgtcagttagaacttttaaaggagaatggtttaactaattttaatgatcgaattttattgaacatcacagattatcacttgtgcgcattagggtatccaataactcaaaaaagtatgaatgatatgttgaaacagttgagtaagaaagtaggggttaataatcaaaatttaaatataagtatgtatacttgtcgtcatactgtagcaacaaaattagggaatacaccaggcatgtcttacccttgggcggcaagcagattagggcattctttaaagatgtttatgcggacatatgtacatgttgatgaagatcgaaatgaagaaatgcttagattgatagctaaaagataaaagaaaaatgcaaaaataacttatatttgataaaaaaatgaattaatgtagtaatagcaagaatttgaaaataataaataacaaataatttttaacattttatagattttgaaaaaaaaagagcgtatactcagggcatcataaagagatgtgaaggagaaatcaaaatggttattgtagaacaaaagtttaataaatataatcatacaagcaacatggatgctatggagtacgctgcaggatgttgcacatgtacaacaacaagttgtacaacttcatgtgccgctgtagctgaaagttaatggatagttggcgctgtaaattatattacagtgctttttttaggagtataaatactgttatgtgtctattaagaataaaagacttaaaagttaattttaaggatcaaacagtactggattttagaggtcatgatatagagataaagtcaggagacaaagtagctctaattggaaaaaatggggcaggaaaaagtacactattaaattgtcttttacatgaagtaaaatacactggctgtataaaggagaagtatcatcagtcggatataggagtagtttttcaagaaaatgtatattttaaattcttgaaagtttatgaaatctttgaattagtgtggaataaacctaaaaagttaattttaaaatctaaatttattaagaattttaatttagcaagcattatgaataaatacatttctgacttatctggtggtgaaaaacagagattaacaatagctttggttttttctcaaaataaaaagatttacttactagatgaaataaattccggcttagattatgataacaggcatgaattaagtaaaatcataaataatattactgaagaaaaaacagtaatacaaataagtcattattttgaagaagttgaaaattgggctaataaattgataatccttgatagaggcaagatgatatattttggaagcttatctaagttttattctataaataagcatgattcattaattattataaatgataaaaaaagcctatctagactgacccagaagcctttaaatctttatagtaataaatatattgtatctagtagtattgatgagagacatgatataacaaatttattagagcaacaaaagatagattataaagtggtgccacaaaatttatacacaacttataaattagcattagtaaaacatgaggataggtaaaataatggctagagaaattttattaagtttaaaagcacaacttagagttccaattgctgtatttttttctattttttttccaattattatgatgattatgatgatgacatcttacggtaatttttcattaagaaatggatatcactttatagataagtatttttttattagtactactataggtattctacctctaaccttaattagttttcctattgatataaataatttgcttgaaactaagcattacttgcgtttgaaatacttaaatgttgatttaaaaaaattatttttatcaaatattatttcttatttgataattgtatttatttcagttggaataaatttaatagtaggaaaaagtatatataatttaagattacctagtatagagtatttatgttatttttttattcaattattctattgtgcgatagttctacttatatttggcttactgttaagtttaatagtatcagatatcaaagctttaatgcctgtaggaatgactataatgtttatattatttatggttataggtgtttttgtacagtatagctccttaccgaaaattatacgtactatttctagctacataccagtaaaatatttggcaaatgatttctattatatctggattggtcaggctaaatggaatatgccattttttaaatgtaatacgatctggcttatttttctgtgtttgatttgttacataatttatagaaggaagaataatgttacgaagattttcaactagtaaggatttaagaattgggatagagataatagttggaatcactttatcatttatcattaattttataatgatttcaattgggtatgccattacaaatagtgaaaaattaaaagaatattcggtcaattattttggattagtcatatataaaataaagaattatggaaataaaggtataccagtttccaataatatgatgtttatcggaatagttttaacaataatatttgtttttattgtagagtgggttgtatataagagggataagaatggtagagtatgagcttaaaggattatttaatcaaaatacgctttcaacatcagatattagtaataataataattacaataatcaacaattatttgatcatattataagaggaaatgctaattctgagatgctgacatacttacttaatatgaaccatcagcgattgaatgattttaagagtatgcatcaatataattatggaaattttgcatccttaatgaacagtgtagaacagtataacgaaatagaaaatgatgaaactattttgctacctaagccattgagaataaaaaataagttacagcaggttctaaagaaaagaaaaagtgttagaaattatataggcttatcatgtgatttacgagaattgtccacaatattgatgtattcatttggaatctcgggaagaaaagagaattttggtggaatagtcgcaagtatgcgatattacgcttctggaggtgctctatatccaatttcagtgattatatatataaataaggtggatggattgaaaaaggggctgtatttatatcagccaatgtatcattccttattaccactaaatattaaaactcaaatcgatattaataaattatttgtaggaagtaacattgatgttaaaaatagtagcttttttgtattttataaatatgcgattagttctacatatttaaaatatggtgagctatctttagctaatattttgattgaagcgggaatgatggcgcaaaatttttccttagtaactacagcatgtggttttgggtcatgtccaattgcaggatataacaaaagatttattgaagatatttgtaatttagatcatgttaatgagcatataatttttactgaaagttgtgggagaaatgaatagcgatacgattttttttgtaaaaaaagatacacatattaattctaatataaacgaatggatattaagtaagggaataattcataaaagcactttaacaataagtaaaaatgaaagtagtactttgtttgtaagtttattcaagcaattaatacaaaatcaggaaattaaagttagtgaagatgatgaagagtattcagactttaaaaaacttgttcagcttggatttttaggaataagaaataaaaataaaaaagtagcacttattgtggaagaaagtgcaaaaaacttctttgaaaactatttaaaagatgaaaatatatgtgttagctcattagatgagtttataactcaagatacattaaatattttaattgaagaaaaaaataatactaaattaaataaaatagttcaaaactataaaaataaatacaaagatgtagatttgatttttgtttgttctttgtattatgaaaattatttaaaaggaatcaacaagctaactaaattaattagtatcccatataatataggattttatgataataataatatatttgctactagaataatacatggagagactggctgctatcaatgtcttgaaaatcaaatactacaaaaatttgatggatatatcgaagattatgtatcagaaatggattctgaaaaacaagtatttgatataaaaaattatggagtattaatatctataattaagtcagagatagaagaactaaatttatactctgatacagagctacgaggaaatgttcttcatttttatttacctacttatgaatacaattttgataagaatagaattcaaagtgattgctcagtttgttctactataaataatattttatttaaagaacaaaatatgaaagcgtgcaatattttagccgaggttttaggtaatgataaatatcaagaataatttagaatataatttattgcgtcaacggatcttgggtggcgctataactggaatctggaaaaaggatactttctttattggcgaaagttcgtatccggtaatgaattataattatattactgcaaactttactaattttgaaaaattcgcttttcctggctatgttcccccgattaattatcatcttagtggctacggcttatcttataataaagctttatcggcttttctaggtgaaagtacagaaagatattctttttcagtcttatatcaaaacattaagcataatatcatttattctgattatcaaaatcttcagaaaaagtattctaattgttatatagtacctttaaattatattaatatttatttttcaaaagaagataaagaaaattatataactaaaaaagatccaataagatggatagcattaaattcactatttgatattaataaaaaggtactagttccgcttcagttttatattatgtataccaacagtatatttaaaaatgaaaaaagaattgtaaatagtgctacatcaacaggaactgcttcgcaagaaagctttgataaaagtctggaaaatgccatagttgagttcttacaaatagattcttttaatctttggtggtatggaggtctaagaggtaaaaatttaaatattgatacagaaggcttattaaaggaattgttcccaaacaataatagactttggatgtttttaaaaaaatttacggttaattttatagatattagttttgacaaagcaattaatgtagttgtttgcgaaattaccagtaatagtgatagtaaactacctaaatatgtagtaggagttcaaggaggattttgtttaaataagtgtattgaacgatccttttttgaatgtgtaactgttttagaatattgttttactcaaagttgggttgaaggttctaaatttaaaaagatttctacaaatatagatgatttaaatgtaaataatttagacgataatgtattgttttatgctaaaaatggaaagcctaaattaatcaaaaaagagaatattttaagagtgtccaaaaaggttactaatttaaaagatttgcttttgaatttaaagagcatctctaagtatgcaggatatttaaatattacgcctccagaatttagaaatcaaaactttgaaatatgtagagtatttataccagagcttttaccaatttctttaccgtcttatccgccttattatcatccaagatacagtaaaataggaggtattattaataatgtcccccatcctttggcttaaaatagcttttttcatcactttgtttccaggcggaatatatttgataataagaagaatattgtccagccatagaaaaagcataacagtatatttaataaccttggtaattgtagctattgtaaataccattattttaaagatcaattttaataggtatattgaaatcatcttaatattgattattccttttacgtattatttttttgagtatgttataaggtataaaagattcaatatcttaagttttaaggctaataaaacaattatttatgttttagttttttttcctatatttgaagaagttgtttaccgtttctttatatttaaatattgttcggttttaggcttttctggaatacaggctatgatatttgcaacgttatgctttgaattttcgcacatatattatttaggctttaaagctattaataaattatttttttcctttattcaaagtatgttgtttttggtttttcaaagtttattgttaataatatgtttacacataatttttaatttatatgtgtatttacacaaaaaagatatgtataaagttattttttgatattgacttgtattacgtatataacaatatgtgccacacggtttctagaaaaatcctaaagagtgctaattttaaaagcaaaaattgttaagccttttacgcttctagtcagcattagaaatacgtttaagtctttcaaataagttcaatgaagcttgatttgaaaggcttttttgctactttgaactagaatgaaattctttgaaataataaggatttatttgaaattaacacaattcaaacacacagatacgattcatgtgttaagaatgtgcttgaaggaaaattaagagtactaaatatagtgatttaacaggcgttggagcctgttttttttgtgtttggttagggcattttgtttaaattaaattcagtggatttttgtgcaaaaaaatagccatattgtagggttatacatattgactattttctattattaaaattatttcaattcagccacaaacctaattccttgataagaaggaaacttgtaattatcccatgaaaaataagtgtctggaaattagttctttctatttaatctcaatgctatttcaagttagctattaatctgtatcctaagaatccattgctagattttggagactgtaaaatagtttgtgtaaggatgaatgattccttaaatttatttctttaaacattagaaaaaggagttccttaaatttatttctttaaacattagaaaaaggagttcctttctcgtatgattggtttgaacaaaaaaacacatacagaaagaagaactccttcatgaatgattttaccaaagattttgctcaagctctattcaatccagacaaaataaatgatttattgcgcaaagagctacaacaggctgttaataaattgctagaagctgaattgactgcctttctgggctatgatccctatgccagaaatggctggaatactggcaactctagaaatggtgcttatttccgcaaagttgatacgcaatttggcccaattgaagtgcaagtgcctcgggatcgcaacggtcagtttcatcagcacacgctgcctggctacaagcagcactcggatatcttggaaagcatgattatcaagctttactccaagggcgtgaccaccagggaaatagccgatctaattgaaaagatgtatggcagccattacagtccagctcaggtatcaaatatttccaagcagatgattccaaaggttgaggcttaccacaaacgcaagctaagcgacaagtttttctgcgtctatttggatgcgacataccttcctttgcgccgagaaacatttgagcgtgaagcagtctatattgccattggcatcaagcctaatgggcacaaggaggtcattgactactgcattgcacctagcgagaacattgaagtctggacagatatgcttcaaaacatgaaatcccgaggcttaaagcaagttgagctttttctttctgatggtgttgttggcatgaaaacagccttggccaggacttatcctaaagctcattttcaacgctgtttggttcatgtcatgcgcaatatctgcgctaaagtacgcgtcgacgatcgtgaaaagatcatgaacgaattcaaacaggtgcatcaacagacaaacaaagaagaagccacagctgtcctgcatgacttctataccaaatggggcaaggtttacagccatgttatcagaagcttgaaagacatagaaccagatctgctggtcttttataactatcccaagcagatcagagcttcaatttattcgactaacatgattgaatcatttaacaatgtgatcaagcgcaaagctaagcctaaggcagagtttccaactgaacagtcgcttgatgcttttattggcattcaggcaatgagctacaatgaccgttatttcaatcgaattcataaaggctttggtcaggttcaggacaccttagaatcctactttgattaaataaataattaaaaaatcaatttacgagaaagatctatttacacaaaagatttgacagtttcagattttggattccaagcaatacctacaccaatttttgtatattgaccagataaaagaatgtctctatgtccccaattagatcctgcatcatgataaatgaaattatttaagcaaatttttgcttgtgtagatggggtatcagtattatcaactgcacctccagcaagcacttctgcgtattgagtgcggcttccgtctggccttgtatggctaaaacttgtatttgcttcggtagctctagtccttgcatattcttgcagagaagtatcaagtgttaaagaatttagtccctttgattgacgtaattgatttaattgcgcaataaattcttgttctaatttggtagcaaaatcagaatccttaatgtttgtatattcattattgggttttgtatttgtggtttcattatgcttaataaaattgcttgaattagcactttgagtatttgtttcatcggatgtacttttagtaatagcagatgttttagaagtgtcaggttctgaaactttgtgagttaattctgaactaatccatttgttagttccaactttgtaccatgttttaccacggctatccttcttttctgcataaacatataagtattttttaccatgaattattttagtgcggtaagcttttacacttctgcctttcttgagtgttcttgctcctttaatacgcttgcctttatagttgtaaacataagcattgtgagtaagttttacgctgctagtgcttgcttctactacattggcttgttcgttgccagcaacaactgtagctgaaagcaatagagctgatgaaagcgtaatggttgatagtaatttagtaacgtttttcttttgtaacatggtagttacctcctatattccttatttcagattagcaataagactgtaccctaaaaatccgttacttaatacgggatcgaaagcaaatccaactccaatttttgtatattgactagataaaagaatgtctctatgtccccaattagagcctgcatcatgatagatgaagcttctcaattgttggctggcttcttgctctggtgtacttgtgtcgttaactgttcctcctgcaagtacttctgcatattgagttctacttccatcgggtctaatatggtcaaatttagtattggcttcattagctctggttactgcataagattgaagtgtattatctatgcttaatggcgctaacccattggatctacgtaattcatttaattgagttacaaaagattgttcagtttcatttgcaaagtttgagtttatgatatttgaatacgtctgttcatttgaagccgaattattatcttgttgagtaatactttgtgaatctgctttttgacagtttttggaactatttctttttgtataaaatttatcagtgtcagtagcaagtatccatttgttatcaccaattttataccaaattttatcgttaactttttcttgagcataaacttttacagattgtccgactccaatgtattcgccagtaggtgattgattgggagctttatatgtttcacccaatccattatctgtaatttttgcagtgaacaaataatttgattttgtgttttgcacatttgcgagcctgatatagtgatgactaccaatgtataaatattttgtgccacgtattttcttagtgcgataggcttttacatatttgccttttttgagtaatttaacacctctaatacggttgcctttgtagttatagacataagcattatgcgtaagtcttacatttttagtgcttgcttccactacattagcttgttcgttacttgtaacaactgtagctgaaagcaatagagtggatgaaagtgtaatggtcgatagtaatttaacaacttttttcttttgtaacatattagttacctcctacggatattcattatttcaatttctaaattaatgatacatgatgtgaaaatgcatttcactgctgtttttctttgctggaattatatttatctctcgtaaatttataaaaaagtaaaagattgaaaagttaggtgcatcatttaatacaaaatataaactgaaatagattctcgttgaatttgacaagcaatatacagaaattatcaataaaaagtacgttttgctataccttttcataaacctgactacaatgagagttgaagaaggcgtttttgtatgacaaaagaatatgaaaaagaagtcaaagaagcagaaagcgtattggaggaccaaaagttaactgatagtgagatttcacaagaattgatttccaaagataatccaactgaaaatgtaaaaccatctgagattgatttcttgcgtaaaaagccaaatttgacaacgcaaattgatttcactttgttagctgatcttgctgggttatccaaggaagctaaggcagaagcggctgtatagataaaaattttacgtagaaaaaagaccggtttgaaccgatctttatcttataaaaatttactttaggagcgtttgtgaaacttagctactccccaactgattagatagaaagtcgaaatcaaaatgaattgaatttttaattctaaaatgaatagtggaaagtaaaataaaacggaaaacaatagaataatagcgtaaattccttcgaatgttagaaataatctgtttctttttctatttttaagtgttgctagtatcattttttcattcacaaagatccctcctaaaaattatgaaattaagaccaacttaaataaggaatagtccatcggataggaacacctaggagccaatgtccggagctgagaaaagtgttttttaacacaacggtagtaacaattgcaataactgcgagtactaccaataagattagtaatgtactttgtttaatttttgacatgattaatgcatcctcctaatattttttaaacttctattattttgctgggataatgaccggtaattgccaccacattactgtagcctcctcccttttttaatcatttagtcggtttggttaaatactactccttagtgactagaacagattaattttgtatcacatagtttacaaattatttgggccaagttttaattaaatcttgataaccatatttttgtacttcatttctaattttttgcgcttcctctttattgtttaaaaataaattctttaaatataaagcagcaatcttataaagcaaaaaatgtatggttggttttgattccatgatgtagtcaattatttttggaacatgcattaattgaagtgattttttagaaagttttctattatagcaaaccgctagataattctcgaagacacgcaagtatctttcttgttctaattcggagatatttttattgcttttcatctcgttaagtagtctattgataaaaaatgcaagggtatcttgttcccagagcggcattgtattagtaaaaagtcgcagtaattcaggattagtcatccagttttgtccttcgttaaattcaatgaatagatctttttttattttgggatcgatttgatttaatttattttttaaatatgctacagaaatcatagctcttaattttaaaatcttagagtgagattgtgacagaatttcttgatagcatgattcaatttcatcaatttttcctacattgaaggcttgttccattttattatttaaatctgattcaatctttttttgctttgaagtataggttgctcgcaataattggtaaaagtaagtaatatcaacatcatgttcaaaaagaatcgcggctaatttatctgcactaattctgctttttcccgcttctactttcgcataaaaaggccgagtaacaatgttagcagccatttctttttgagtgaggtctagattttgtctaatttttcgtagtgcttgtccaatagtcataaaaaatcctttactctaaaatattttcttctctacgatatatgattattataaatgatgaaaatataagcggataaattaaagagaactatggatatcggaacggcattaagacatttgagagatgatctaggtttgacacaaaagcaaatgattcaggggacgaaaataactgttagtcactattctaaattagagaagggacaaaacaggatatttatcgaaaacctagtcgagatattgaagcaacgaaatatttctttatcatattttgttgatcactatcttaatgatgaaaatagtgaaaaagaagtaaattattcagaaatattaaatattgctttttacgaaaaagataagatcgctgctgaagaaataaaacgacaaattttttcagataagagttctagcaatgaattgagagatagagcaacattaattgtggatatgatagacaaccagggacagagtaatgttgatgctcgaatcattaattctattttcaaacatgacaactggactcagtatgacgaggcaataatattattgggtaatattattagaactagtaatgtattaaatatgagtcctttggtattgactctaattagaaaatataaagatctagataaagaaaaaatcgaaaaacaaagaaggttagcaacggttggaattaattatttatttaattttcgaaagttaagtaaagagtttaataaaactgtgctaaaaattataagctggattaaaacaacatcgattgttcctgagttaggcattattcgagaattaaatgcatattttttagcagtttatgaaggaaacatttctgtctcaactaatatcaaaaatgtccttaaaatatcaggttatcaaaatcttgctaatgatttacctaattaatcccctgagaggggattgagttgctgtggaatgagaagtagataaaatcatagttaattaaatatgaaagagaggcatagtaatttgattattgttagttatccagttttacctgaataactctgagttcatacagtacgaggagatataaattatgaaaaaaagattttgttaagcctaagtttagtagtattaggaaatactttgttttttaattcgagtgtagcttctgcagcgactaataatagatattccgtaaataatacaattcgtcaggcacctaatactggcgatgttcctggtggatggggcattactcctggtcatacacattggggctaagtgatagaagcgatgaatgaattttcattgctctttttattttgggatgcgaattttatgaagaaaagtaaaatcatatttttaatagagcttgtattaaatattattgctgctgtttttctagtaataaataattcattcaaaaatttattagatgtaggcgttgtatttttactacttctattgcttatttggaattttttaagaagaaaaattgagattagtttaaaactatcatggctcaatcttatgatattaccagcaatttttacttattgcttaaatactgtagctaatgttttattggtaaaatatcctgttaaaagtgttttaatagctataatttatagtttgttattcttagtttatttgcttccggtagtaattactaatgcgggattggttaagaataagtatgctagagtttttattgcaatgtattatattgtgctattactttttagcgaaaacttacatatgaatgactacttatcatcctttgtaaattggtctcactctgaaattcttaatgggttagcgttaattccaatcatattttgcttatttaaaagttgggatattcgagcaaagcttaatcttaaatttaggcgatattcaaatatacagttaatagttttattagtagctgtattctttgctgcttggtattccttctttcatagctatgtttatattgcaccaactttttcgcaattattttggaattgggacttctcggaaattatcccaactgaacgagctgttttatggagtttaggagcgattttattcgaagaaggattccggtatctattaataattgtattgcttgaagtttttaaagtgcaaaggggtcaaattgactattttcttgagtgcgctattttttggattgatacattatgccggactacttgaccaaggcccaatatttataatttcaacgcaagcaatttttgcttttggttatggctgctttttggcgacactgtacttatattctggaaaattctggttagtattgctttcacatttttcattagatcttattgcattctcgctttctgcaggtggtggcggaatactatcatggtatggcaataatgatctcttgagtaatggtttgagcatggtttttgctttagttatgacattgattatgtttttaggtaaacaaaggaaaattatgcaagaaaatgctgctagattaattaatgcatgatgcatttaagatggtcgaaagatcatcttttttatgcaataaagtgtcatatataattgacacctactataaaagttgctattattttaaaaacgtcacatataaatgacatctaactagatgaataaagaagaattcaatgaatcgagtaagagaatatcgtaagcaaaagcaaatatcacaaatggagcttgctagacgaataggggtggcaaggcaaaccattaatttgattgagaatgataagtataatccatcgttagaattatgcctaaacttggcgcatgcattaggaacggatttgaatactttgttttgggatggggatgaagcaaaatgagacgagaaagtttatggcttaagtttgtcagatattggtatggcattgatagtaaattagacgagcggcaattagcagaggttgaacgaatcggtaataatgcctatgtaatctctggtatagtggaactgatcttactggttatcacgctaattatggcattgactattaaaagtgagctggctttgtggtttttacctttggcgattgcaattatgatgctgatgatgagtgcttatacttatttgacaatgcgaaaatttaaaatattctctgtcgaaattacagcagatgaacgccccaaagcaattcgtagaatatggataaaggctataatagcgggaataattggtgcagtttttggtacattaggtagcgcgctaggagcttcttctgtgcaaaataatctagtaaatgtgcttgatttttggccacaaggtttatggctaggcgtatgttgcggtgctggtagtgcgattggaagagtgcaacgattgaaagtaattaaagaagacgaataagcgaatcgaaagtagtcgatccgctttttttgctgaaaaactatataattaaagtaacaataaaatttacagcaaggcaaaaaggatgaaaaaacaaaataagactggctcaattggcgtagtgggtgccacggccatcggtgttggtggcatgatgggagcaggcctatatacattgctcggcttggccgccaactctgctggtgtttggctgccagtatcatttctaattggaggcattgtggccgcattttcagtttattcgtattcaaagttaggaatgaagtatccagatcgaggcggtgccgctaagtttttgctaaaagaattcggagatggcctgctagctggtgggatgaacgtcttccagtatatcggctggattatcgccatggcgttatatgcgaccggatttgcggaatatgcctgccaactattgggaaaatcaagctcaggctggctaggtaaggcaatcagtatcggaattgtcatcgtggttgtggcaattaatattatgggttcaaagcaagtggcacgtgcgcaaacggcaattattgcgtttgaattgttaatcttactgtcttttgtagcggtaggtttaactaagctgcatgtgccgacaattactagttcaaatagcggcaatattgtaggtatcctatctgctgcgggtttactttacgtaacttatgaaggttttggcgtagttactaacgctgcagggagtatggtaaatcctaaaaatcagttgccacaagcgctgttcttttcattagggatcgtcatggtgatttacattgtagctagtgtagtcgtggtgatgaccttaggcgttcaaggcgcagtagctaatcaaggccacgttttggcaacggctggtaagctagtattaggcaactggggtctgttcatcacttcactgattgtctgcatcttcgttgtgattttcccattatcagctgttggtgagatggccagcctagcctttttattggtgtatgccatggttaacttaggccacttgcgcattgcaggacaaactggggccaagcgctggattttgatttgctctgttgtattgaatctagctttgtttgctttgttgtttattcagacaattctcaaccacgaaactttaacttggatttcagtaattgctttgttaattattagttttttagttgaacttgcttggcgaaaaaagaataaacgcaacctgcattgattaggaaaaaaatagtaatttatgatacaaaaagtcgacttttgttccacttattgggtacaaaagtcggctttttgtttttttcgttgtcaaaacaatatctttaatattttaattcagatatactctctttgatcaagtttgaagtgagggaaaatgaatgaaaaagttattgatcggaagcgcagtcttagctgccttattaattaaagaaaatatcgcagtaaatgcggcaatagagcaaaacgaaacaacgcctaagattgcagttactgacaaaaaagagaagccaaaagaccagtctgataatagttttgcaggtcattatgaccaagagacaaattttattacctgggaaataaggctgaatcccaagaaagaaaaatatactggtgatttgaagttggaaaatttaattccagaaggcttagttctagatccagatacgattgaagtaattaagaatgataattttattcaaaattctagtttagttaaattgaagaaaaacaaattaacagctgaatttcctgctaagaagtattcagagagcacaattttgattaagtatcgaaccaaggtggaagcagagcctaatgagcctaattatcttcgggtgagtcagtcctttactttgggcgatgatcgagttcaagaatacgagcaagaaattaaatacgatcgaagtaataagaattttaacattgaagcgccacataaatctacgtttagagatgataatcaaatttcgttaattaaaaaatctaaaagtaatgaagaacgctctgaagattggcttaaacgtctagcagagctgattattaataaaaaagaaactacttcagataaaggaggtgaaaaagttcaaggacaggtcaaagatcaaaagcagcaagcttccccagaaaatacaaacctttcacgcactccaactgtcaaaggcttgactggttttgatactaaggctaacgaggtaaaatccacagctaaaatagattctgattcagtaaaaactactctagataaagacgagattaaggacaatgcaagtactatctcgcctaagtcgcaaaaacacgatactcatgtcacactccctaaaagtgacacatcagaaactaaggcaaaattacctaaagctggtgaaactgccggtgttatgctcagcgtattgggcataattttaataattgcagggtggacagttcgaacaaaattcttaaaataatacgcgtggtgctagttaaatcgttctagacaatatgccatattataagctaaaatagctatttctagccgttgttgaaaacctactaagctcctggctcgattattctcagcattgtaatagctaagcaaagaaaagtcgctttcgattgttcttctaattgccattaactgatgatcattatgctttttagcacccctcatgtttttacgatatggtgtccaaagcacgtatcccatacgctttagcttggctgctaagtcttttcctaaatagccttcatctcctaaaagataatggttaattggatgagcattgatcatcaattctaccgtctcttttgcatcatgtaccgacgccttagtaactgcgtagtcaagcagatagccatcatcactcactattgcgtggactttgaagccataatagtagatttttttcgtcgctttataaccaatatcggctatgccacggaagatcttaacgtgataattgcgaacaggctgacaaactggaatcggaaaactgtcgataatcaataattctccacctacctttacttcctgattccaaccctgacggatacaacgaattagaggcaagagcattcgagctcgacggttaaaacgagaatgagataagccaacgaagaatttacagaatcttcgttgagattcaattccaatttcagtttgccaaatgagcatcgctaagatagaactatcaggaagcttggtctgatcaacatttttacgatgtttaagtccatcaggcgcataaagcttatacagcgagcgacaaatcacatttaaccgattaaaactaacttgtaaatggtgagaaaaacgattaagcttgagatagttcaattagatcagactcttttctatttaaattacttacaacttgagtctagtctaattggacttttttattaactaactgaaacttgaaagctaagattaacgctccttccccgcgcctcttggctttttcttatcaaaaataaaaacgcaggctctctctgcgttatactttaagtgtcgacctaaaaagtaaaggagatcctgcgcaatgaacagtatagaacaaatcgacacagaaaatgatactaaatccttaatttcttcatttattaatctaattggtctagctaagttaactaaacaagtcaattttaagcgtaaatccaccgtttcattaaccatgattatctcttggctgatgtcagtacattttgctcggctttctttattcagagctaaggatgacaaacgtttttccgttagaactgctcgcaatgtacttaacgatggaagaatcaactggcaaaaactattatgcttgattgcagcccggctcattggctgcttaaaaccatttatcgataaaagacgccgacttgcttttatcgttgacgatacgctgatggctcggtctttttctaaaaagaccgaattgctagctaaagtctatgaccatgacaagcatgagtatttgaacggatatcgtggtttaactttaggctggagcgatggcaataccttcttgccggttaactttgccttgatgtcaaccaaaaccaagaaaaatatgattggagctgctcccattactgctgatgaacgttcaatttctggtaaaaggagaaatcaagctcagagaaagatgaatgatgtaactgtagagttgattagacaagccttacgattaggagtagaagctaaatacgtcttattcgattcttggttttcttctccaagaatgttttggattttaaagaagatcggtttagatggacttggcatgatcaagaagagttcaaagatttattacatttatcgccatcgccgctatagcgttaaagacttgtatgatcgtttggctgcttcaaacatccgtaaaaagaaacattatctttattcaagcatagttgatgctcaatatcatggacatagctttttattaaagctcgtctttgtctccaaccgtggaaacaagaacaagtatttggttttagctactactcagacaaagcttagccctgaagaaatcatccaactttatggtcgtagatggcaaattgaaacatattttaagacgtctaagcaatatcttgctttagataaatctcaagttcaaagctatgatggccaatgtggctatatcgcagttacagcaataacttatgatctattgacctggcaggaaagacaaaatacagatgataagacaatcggagatttattctatctaatgaacgaatccttacctgatattagattcgtagatgcattggtctacttaatttcagaattaaaagagcttaaacagaatagttttgaaaagatagatgaagtaatcaatgactttattaaccaactgccacgattcatacaaattgcactgaaacagatcatataaaaactaattacgtctaagaaagctcaatagtgacaggacttgagcttgattttggtgctttcaattttcagtgccctattttatgggtcataacctttataactataaaaatgaacataattcttctctaagtactatgactagttacataagagttatgtaatactggttataatagttataattaataccgtaacagttatgaaatttttacgtaactgttataactaagaattccttgaatatcgctatagcaacattttttgggacttcaatcaataatagtaaaagccatcagttatatacttgactaattagatgtggttacaacagttataaaaaaggttataacagtaattacaaatcaacttgtggcagttataatagaattattgttataagcatgtagaaaggtgcgctatattaacatggctgaagaaaacaaaaaaacaaaaaagtatgtaactttgtctgatttagctgatcaaattggaaataaccagattcaactagctacaagaaagaaaagaattagacaaattatagagagtaagaatatagagcatataactaataatcgcacttgggtaattgctgatgaaaatatagaagcaattaaaagtgaatatgctaaaagatggaaaaaagtagacgaagctagattcgatgctaaggcaaagaatgaagagcaacagtttaacaaaataaagatagatgaattaaagcgacagcttaaagaacagaagcaaatttttgatgaaaaagaagattattacaagtacgaattagatcgtattaatagaaagaatgatgctttggaagatgaattaattaatagtcattctgatctagcatcagcaatggaaaaaaatcaagatacacttcaaagacagcaagctttaatggcaagaaatgatcaacttcttactgatatttctaacttcaagtcagaatttacccaaactaataatcaatatcagcaagctcaaagacaaattgaaaatcataaacaagaaatgcaacaaaaggataaggaatttgctaaattaaaagaagaaaaagaaaatttacaaaaagaaaacgagagattaaagaatcgaaacctatttcaacgaatattcaataaataatagtcacgtcaaaaaaaagacgtgactattttactaaatgattgaatttatattcaatgattaaatcctattgtttcattaaataaatattgtttatatcaaaatgatagcattaatatatcatcttgatatatgttattcatctaaaatatagcccgaaatcacaaataataattaatgggtattgcaaaatgctatatttatgatatatttaatttgcaaagaaggtaaaatgctttaaacaaaaaggagtaaataaaaaatgatcagtaaaagcaaagcaaaaaaagaaatgtttgtatcatgtgatttagggtatggtgcaatcaaggcaaactttgatggtgtcaaagtaaagcaggattctgtttatgttccaatttatgagaatccaagttgggaagatggtatcgacttggaaaatcccgatgcagttgatgaagccattaagaatttgcttaataagttagatgtatcaattaatgatactcgctatttagttggtaagtctgcacttgataaattgggtcagactattacaatgcaaatggacgctccaaatggaaaagccgacagcaatagtgcaattattttgccagatgcttttattgccggaagggcaattcaagaagcctatgaaaattctagtgacgaatttgttatcggtgaacctattcaagtcaacgtacaaatggttacagcacttccaatttcagaggcgagaaatgaaaatggtgaagatgtaagaccagaatatgccgatagatttactaaaaaggttcatactgttactgtacatagcttaggcgaggatattgttgtaaggattaagtatgataacgttttagtattaaaagaaggacaaattgctactaattctgctattcaacatggcgatgctaagatagctaaaaaattaattgctcaacttaaaaaggattatccagatagagctgatgaagcagaagatttaattttaaaggctacagattatattagtattgatattggtcaaggcactaccgatatggctttgttctatgaaggagctgttaatgacaactcttactcaatcaatcaaggatttggaaatataattgaagatgtctttaagagatttagagaccctttgattaagacaaaggaagacttcgttagagtatggcatggtgaagccggtcttagagatttacaaactaagattgataatcaaatcaagcaggaatcaaatgacttgcaggctgatattcttactggtctaacaagtttacttagaaaaaatccagctacaaaagtaatttatgtttttggtggtggttctattccaatgatggaaagatacgatctaggtaagaagatcaaggatcgtatcaaacttcttcggacacctgctgtattagtatgggtaggtaaggattacgcccaagacttaaatgaaattgccttagataatattgcctcttatttaaaagagcaagcaaaataggacttggtgtaaatgaaggaaaagaagaaaactagtaattcaaataacactattcttagggttgaaaaagggtctttagaggacaaatggttaagtgcccaaagtaataaaacttttgcacttaagttactaataagaaatgcctatcgtcaatttggtaatattgatttgcaaaatgtagcgatagataatttcttgcaaagtccaatgatagaccttgctaaacaatcacgaaaagaaaatttcaaagaagaacaagcatcttcggataattctaatgctgaaaaaattgcttcttcgtttaaccatgaacataaagataaggctgataccaccaagtatcaacaagataatgatgatgtgttaaatgattatcaaagtgatgaatttggtgttcagtctaattcttctgataattctaatggtaatgaagaaaaagttctaaatgaaccttctcaagaagcaaaaaagaggaaaaagaagattattacttctaaaggaaagaaaagttctcaaagaaattattctagtgaagtaagaaatgcgcttccagatattatgaaaggcattgattaatcttctttacgtcaaaagtcttgatgtacaagtcaaggcttttttcttttctaaaagttaatactacttcttgtctttttatttatttgcctataaactaaaagtggcataaataatatgtttatgctgtgaagttattttgcattctttgctaatatgcaattaaaatatcgtataaaaagagtggagtttattactgatcatctccactccttttttattaaagatagctttaagactaatttaagatagcataaataaatatcgaacctatcatcaatattaatttatgctataagtttgatatatttttgatagcatataaaaaggggcgtttctttagaacgcccctttttattcttgtttcaattaatttgacgtatcgtaatcgtaagttacattgccatcagtggttgttccactgtcactatcactactatcatttccgtcactattatttgaattatccgaattactattatctgaattatttgaatttccgctgtcactatcattattagttacaacattttgattttgactggagttatcatcgttattttgagtagatgaatcagattggctattattgttgttattatcatcgtccttcttattttgatcatcgttgtctttatcatcactatctttatctttagtttttgatttcttgactttatcagtatcaatattatcaaaacttggtgcatgtcctttgatgtacaattctgtagtgattgcacgaccaattcgaactttttgagcaattacatcatctggtttagtccagtcagatgaggtcttattttccatcaagtaactcatcatctctttataaaagagttgagctgatcgttcgccagttttatctatggtaccttcgctgatcttatcgtaaccagtccaaacaccaatactgtattgcttagtatagccaacgaaccaactatcttttggagtattgcggtaacttggatagctggctaattctttatcagagtatttaacagtaccagttttacctgcttgatatacgtctgaaattttagcgtatttaccagacccctgtgtgataacgcccttaagcatgtcggtgatcatgtaagcagttgagtccttcatcactcttgtaccactatcatcataatttctagttaagccgtctggagcttcaactttatgaacgaatcttggtttgtgataaattccttctgttgcaaatgcaccaaaggcaccagccatttgaacggtagatgcattagcaccaatggctacagacaaaccttgtttaaggtcaacattaacgcccatttttttagcgaatttagcaccacgacctaaacctatttcttccaaagttcttacagcaggtacgtttcttgattgttcaagtgcatacctcatggtcatagcaccttgatagcgattatcccaatcgtacagttgaacgttagtccccttgtacgtatacggagtatcttgcactacttgtgcagttgaccagttcttatattcgattgctggtgcgtaatctaaaactggcttaattgaagaaccggttgatctacctgtttgaacagctctatcgtatccaagctgtacgttaggtaatttacgaccacctaagattgcaattatatgtccattcgaaggatcaacaacggttgaagcaatttgcatcttatcgttagtaaatggtacttccccatcattcgctaattcatagagcttgttttgaactttttgatcaatattaatagtgatctttagattgtctcggtaaggatcaaaaccgtcagctttaacttcgctgataacttccttaatataaggatcatcaattctacgttgtttgctgttagtagggtgcttagtctttaagcccttagtaatactttctttagtggcttgctcgtattgttgctgatttattttatcgtttgatagcatagcctttaacactaaatcacgtctctgcttagcaaatttaggataaatatatgggttgtagattgtcggtgcattaggcattccagccatcaaagctgtttgagctaaatctaaatcttgtaatgatttaccatagtaaaattccgaagcagtttgtaaaccatattggttatagttcatatatactttgttgacatagaactctaggatttgctcacgagaatattgttggctaatcttagcggatagccaagcttcttgaattttacgtttgaatgttctgtctttttcattagtggagaatacggaaagcttaacaagttgctgagtcaatgatgatccaccagccatattaccaccccgaacattgtttaccaaagcaccaacggtacggataggatcaacaccaaatttttcttggtaaaatcgtctatcttcgattgagattaaggcatcctttaattgttgcggtatatccttgctcttgacgtaggtacgtttgtcatcacccaaagagaagagcaatttaccgtcattagtataaagtgtagaacttccggcattttgtagttgtgattgactgatgttaggagccttgcttgcgtaataagcaaaaagaccaataccaataaatactaataaaacgcccgaagcgaatccccatttaataatttgaaaagcaatgtgtaaatacttgtttttaggctgtcgctttctggttaatctatgaggttcagaatgcaactttgcttgttgatctctcttagcaaaattagattgacgaggctcataattatttggattaggagtctcttgttcaccacttgaatacgcctcattatattcatcgtaatcatctttgcgcataatgactttgtttccttcctactatttgagaaatattttacgttttcaaaatagtaaatgcctaaaaacttctaaaacacaaaaatgaaaatcatattttgaaaatcaaagaaattgagctatatttttccagccaccattaaaatctttctcgaagattatttagtgggtggtggttaaaatccctaaagttgtaaaatttgcattacctgttgtcggtgtaatactgcttatatttattgccataataggtgcttttgcaggtaaccaagtgattcagcaacaacagcaggacaactgtgataccgaagaaactcaaacagcttctccggtatctggtggtaagaaaaacaaagttaaaggaataaaagttaaagaatataaaattaccaaccaaaaaacttatattgctcaaatcaaggagctaggtaaggcaatcggtaagaaaattggagttagaccagcgtgggtattcgctcaactttacgctgaatctggtcctgatggtagtcagccggttaaccgtaaagaccataacctttctggtatgagttggtctcccggatgtggttatgctaagggaacttcaagaggttccggtggtagtgaaggtggttggtatcgacactacaagaactttgcggaatttggtgccgattacgcaactactttaagaaatgactttgccaaaacaggtaagccacgtaatgttagtgactatgtaaataagttgaagaatgctagatatatggctaccagcgatattggaagatataaaaccaatatgcgcactgctttaaataacttctggggtggtaaatcaactttgtctggtgccgtacaggttgccgaagacgctggaaccgatactggtgaaaattgtggcagtaatggtggagatgacggtaacttcaaagcctctggcgacattcttaaggaagctaaaaagtggcttcataagttccactactcatacggacgttcagctaatgcacactggaagcatccaagtagtaatgatacgaccgactgttccggctttgtctggcttgtacttaaacgtgcaggatataaagttccaagctcaacatgggcaactccatcaatggaaagtgacgctaaaggttctcacaaatggctaaaacgaattagttctaaaagcgctggacccggtgatattatcattgtcaatcaaggtggcggtggtggtcaaagtggtcacacagctatcttgctagaaaagtacaaaggtaattccaccaaaatcatcgaagaaggtggggattcacgttatgatcgtgtaaacatccgtactattggttatgcttttggtccattattgcatggtggacgaactacgtttgcacgtcctcataagaagtagaatagataagaggtgaaaattatgaataattttgataaccaacaaaatcaaaatcgcaaccaaaattttgattttaagccttattcaaatcaaaatgagccggataatgaggaaaagaagcccaaaaatgataatttttttatcattattattggtggtgtagttttaatcttgcttttaggtgctgtctgtctagtatcactgaaacaaaagaacgatgaggctcaaagacaagctcaaagagcaagctcatcaaccgtacaaataaagaaattgcctcaagacagcgacagttctaataattcatcacaaaatatttctgctgatgacgctaaaaataatgtaaagtctgcctttaattttgcatttaagatcatgtcacaggttaatgcagtaagtggtgaagcgatggacttaacacaattaagcgatagtgatgctaaaacattgtctcgcctttttactacttcacaggttttgcaagattttaatgatgctactaattactctagtgataataatgacactatttacggagacgctggtacaggtgaaaagaaggttaaacatcctaaagtgggtaataaatattcagtgaaaagcacctcatttagcatcaactctgatagtggggataattacgtgtttaacgtaactatgaaataccagccaaaaggttttaaaacatcaagtattggtttggttgtttcggtttctaaatcgaccggtaaattaaccaatgttgaacagaaggtatagtaatgcagaaaaatagaggacaggaaaaaatcaatttaagcacaattatattggctacgtttgctgtagtaatagtaatccttattcttgcatcgacactaatttctctcaatttaaacaaggataatgaaaaattaagtgcagtacaagaaagcaacactacgttgcaacgtaggctagacactttagcccctaacaagattacattaccggcaggtcggttcccacttgaagctaatgaaaagctcttaagcaaggcatacactcaactaatggagtttgtttatacaggaaccaactctgataaaccttttaatgcaaataaaaatactttgattcagtatttcagcaaggatggttatgacaggcttaagaaagaaactttattgcaagatggaaataaagtgaaatcgttaagtaaagagcttaaaacttgtgaaattacattttctaactttaatttgaaagataaaaccgtagatttaacgatctattctgattattctcttgctaaaccatcatcaaacgtacgagagggtatttcagttatcacgttgacttatgattttaattctcttacagtatcaaactttgatatgaggagtacatcagtagaaaagcaggagattttctaaatgaacagattatttactgaaaagaaccgcaagctcttttactttgagtcagcgatcataatttttcttctgatattagtagtatttttaggcttaagccgtacaagagtgcagaaacagacttctgcaattaaaaagcagaatatagaactaaatcaaaaaatacaagctaagcagattaaattgaacaaagaagcatcagataaagctttgtctgatgccgaccgtgaagttaaggtaagtgctttgcaggttcagagtgaaaagagtgcaaaaaagttaatcaataagctatttccgatcttattgacttattctgatagtaagtcatatttgaagagaaaagatttagcagagccatatttatctgaatccgtattacatagtaaaaatatttttgcaacaagtgatacggacatggatcaacttgatgaaataggacttcattctaaatttaagtccgtaggttgttcaatgggtattatcaagggtaatcacattcctatgattattcttacttcatacgaaagctgggaaagtggattaagacatggtgttggtcaagacatttatgaagcttcttataatataagcaccggcaagctagatcatttggaaagaatcaataatctctattctggtcgtgtcaatgacgatgatgacgacaccaatgactaaagtaaaagaaaagccattcaagcaaaagcttgagtggcttttctaattatgagcaaaaatatctgtaaagcgaatcaaactgttaatagccagaatacagttaagcaagttagccatttcatagtgtttaatgttgttttcactgctgtccttgtcaatcattaattcattattaataagagttacgccatacttcttagcgatcttatcaagagcgccatataattcgggtgaaagagtgtctaaacggcactcttttcttttttcagatagcaaataaagagtatagccttcatcggtatatcttttttccttttttacatacgaaactctgatttcttctttattaagatcaagaaacttcatttcataggtagtcctatcatctgaatcaaaaatcctattaattagcagactgtcgctgttgctgtatacatccatttcttttacgtttgcctttcgatttcaattttaaccgccaaatatagctagttataagcaagtgtgagcgagttatcagattatagtcatgcttaatataatgaaagcctagcttggttcctacattatctggtgttaagaactggcttctggtttggtgccatgaaaaagtacgcttattgctcgtctgaatttttataacttttgctaaagtaagatgttcagcaccattttcgctgtaatcacggtagggaacaactaaatagttgcctacaagcgtatcccgatagtgatatggatttaagagtttttccaaatttaaggcattagtcagcttaggcggactccaaagccaattttttttgccagaaacgtattctacttttatccaatagtattttttctttttcatgggatcacctttctattagaaattataacctaataagatcatcagttcatttggctattcaaaataaaaaatgggatgaaaaagcgaaaaaagaaaaaactttttaaaaaaatttttgagttttttcaagaatgctgttatatcaacgttcctagcacctaaaaaaatggttcctaaatttgcacacatgcaaaaagcatgtattataagaatcagcaagtgagtgataagcaattaccactcatttgaaaaaatcaattattaaattttttagtaagggagacttatagaaatgagcaagaaaatttctttaaacaaagttttagcattgggcgcaactagcaccgcattatttagtggagcaatgatgatgaataacaacaaagttgaagcttcttcatcaagcatcgttttgttgaagttcaagcacaatgcttatagatacaacaagaatggtaagcgtattggtacaggttacatcactaaaggctctacctactactcaaagggtgcttacagaatccacggcaagaaatatcacaagctcgatacaaaaggcaacatctacattaaagatggtaacttatcaactcgccgtttaaccaatcaagtaactcttaagcacaacgcttacatttacaacattcacggcagacgtatcaacaaacaaaagttatacaaaggcgttagttacttcatctatggttcaagatacatcaatggtaagaaatattaccaaattggcgctcaagaatacatcaaggcttcaaatgcttccgctccattttcaacctacggtcaaagcagtaacaacgatgtagataacactactaataacagtaatgtttcaaacaacagcgcaactaatacttccactactactcaaaccaatacaaatactaatgtgggtagcaacacctcatcaaataattcaagcgtaatcaataaccaatctgcttcaaacaacagctcaagttccgctaataacaacattcaattaccaaacaactcatcacaaagtaataacactggtaatcaaggttcaaccactaagcccaatacaggtaacaacggtagtcaaagcactaagcctaataccggtaatcaaggttcaatcactaagccaaacacaggtaacaatggtagccaagtaactaaacctaatactggtaatcaaggtcaagaaaccaagccttcacaaccaacttacagtaagaactacgttaaattaccagcaggttaccttgaggctgtaaagaacgcaaattggaaaaagactagtgttccagattcattaattattaaaggtacagaagaaaatatttttcattctgaatctaaagcagatgatgaaatgaagattgatagtgctaatttaactccagatcaagcttacgaaatcaacaattttgcccttcgtttgattaataatgttcgtgcagaaaatggtcaaaaaccgtggtactactcaaacagatcatatgctattgctaaaagagttgcttacctttacgaacaagatcacatgggattatctacttggcatgatgataaggctttaaaccaagttgatagagaagcaggtattcacactgctgaattaatgggtggcgataatgtaaactataaagaagattacctaaacaacatgactgatttaaaacgtgccgtttacaatgatgtagttggaatgctctttagtacagttgaacttcgtcacgcccaaatcatgttgacttacaactctattgaccacccagaaactacttactttggcttttcagtctcatggcaagcacacaacaaagatggtcaccaagaacactctgatcactttattgcttattaatgagtaaaaagtcaaaatacatgtaatagatgttattctaaagaccgatgaaaaatcggtctttttttggaggaaaaaatggttatctatgcacttgcaataacaattatctttataatttttccagcgcttttaatactactaactgaaaattgaaagcaccaaaatcaagctcaagtcctgtcactattgagctttcttagacgtaattagtttttatatgatctgtttcagtgcaatttgtatgaatcgtggcagttggttaataaagtcattgattacttcatctatcttttcaaaactattctgtttaagctcttttaattctgaaattaagtagaccaatgcatctacgaatctaatatcaggtaaggattcgttcattagatagaataaatctccgattgtcttatcatctgtattttgtctttcctgccaggtcaatagatcataagttattgctgtaactgcgatatagccacattggccatcatagctttgaacttgagatttatctaaagcaagatattgcttagacgtcttaaaatatgtttcaatttgccatctacgaccataaagttggatgatttcttcagggctaagctttgtctgagtagtagctaaaaccaaatacttgttcttgtttccacggttggagacaaagacgagctttaataaaaagctatgtccatgatattgagcctcaactatgcttgaataaagataatgtttctttttacggatgtttgaagcagccaaacgatcatacaagtctttaacgctatagcggcgatggcgataaatgtaataaatctttgaactcttcttgatcatgccaagtccatctaaaccgatcttctttaaaatccaaaacattcttggagaagaaaaccaagaatcgaataagacgtatttagcttctactcctaatcgtaaggcttgtctaatcaactctacagttacatcattcatctttctctgagcttgatttctccttttaccagaaattgaacgttcatcagcagtaatgggagcagctccaatcatatttttcttggttttggttgacatcaaggcaaagttaaccggcaagaaggtattgccatcgctccagcctaaagttaaaccacgatatccgttcaaatactcatgcttgtcatggtcatagactttagctagcaattcggtctttttagaaaaagaccgagccatcagcgtatcgtcaacgataaaagcaagtcggcgtcttttatcgataaatggttttaagcagccaatgagccgggctgcaatcaagcataatagtttttgccagttgattcttccatcgttaagtacattgcgagcagttctaacggaaaaacgtttgtcatccttagctctgaataaagaaagccgagcaaaatgtactgacatcagccaagagataatcatggttaatgaaacggtggatttacgcttaaaattgacttgtttagttaacttagctagaccaattagattaataaatgaagaaattaaggatttagtatcattttctgtgtcgatttgttctatactgttcattgcgcaggatctcctttactttttaggtcgacacttaaagtataacgcagagagagcctgcgtttttatttttgataagaaaaagccaagaggcgcggggaaggagcgttaatcttagctttcaagtttcagtaactaaaacgatttaactagcaccacgcgtaaaataatctatatttgtactaaaatacggattttcaatagccaaaatagactctttcacgtattatttagatagataaacttgtatcatgaaagagaaacaaacatgccgtacactatttcagaaattattgttttattttttacttattcagttatcggctggctttgggaaaccttttattgttcgatcaaagaccaccattatgattatcggggatttctgtttggtccttactgccccgtatatgggttcgccgttactacaattttaatttgtaccaaagacgtgcgagataacctgctccttttatttatagtagggactatcgttgccactattttcgaatttgtggctagttggctattagagacaatctttcacatgaagctttggaattattcaaaattatggggtaacattcaaggtcgagtggccccaatgatttcattattttggggcgttggtgtagttttattagtaaaatttattcagccaatcattcagaagctcattaataatgaagaaaagataactcatggctggctagctgtgggtattaccattgttatgggtattgacttagtattaacagtaatcagtgtcgagagattccatactacaactaagatgtgggatgtgcatattaaccactttattgagcgagttagaactaaagtagaaagtcatatgcctgagaaaggaaaattgcgggttggtgattggcaccactcagtgatgcagcactatgatgaattacaaccgcaacgattaagctggaatcataagcgctacttgaagagctttccaaaattaaaagttactgatgctcctaagttcatggaaattaagaaagaagtcttgaagaaagaaagctaactaacataatcttattttgtgggattgaaaaaagtcggatgatcatattaggtcatccgactttttcttatccattaattctatttggttcacgttttttactttttatttcggtgtagttatctaaaacgttggcatagcgtccaagggtgaaaaggtaatcagataatcgattgaggtattttaatacgtcatctgataattcctgttcatttaaacttaatttgaccaatataatagcaacaccatcaactcctgaaactactgaagaagaacatctgacagtaaaagatcatgtgggttcatcaactttaagaagaggattaccacaaactggtgaaaagaaatctactttgaatgcaggctttgcccttgctggcataggcttggctttgcttgcagggatgttgtttgatcctaaaaagaagcactaatactgaataagaattaagttcgttaaagatcgaatcattttgggttcgatcttttttagtaacaaaatttaaaaaatcccaccttcgtgaataattgaatactttatatatttcaatcgtccactttagtgggattgtattaattcaggatgatctttttgaatttcctgtttttgaagggcagaccaagtccatggaagagttttttagtcgcctagaaactataggcaaggcttggcataaagcctatgataccattgattccgatacagatagagtcattaagagaactaaaatggatgctcgtactacgttagacctactagaacatctatcacctgtacagttctcttgaagagaaaaagaatatcagcacgtcaccagtatggttcttagactatgatcaaaaaatttattgtactgatgatgccatcattggtcagatgcttcaaaccattaatcatgacattacccgacgcagcagtcgtagcttattacactggaaaattcttaaacaaaattgttccagaaatttttatttttgatggatgttattttttgcttggttctaagcgattttatttatcaaagttaatagttctatgttatattataagtgttataataatgtaaaaattattaagcattgaaatatagtgcattatgatacgaggagaaagatcatgttagaaagagtcccaaaatatacactaagaaaactgtcagttggcttggcctcagtgatgattggatcaggaatactgatgaactctccaaaggtacttgctgatactattaacccaaatgaaggtactagtactgctgttcaaccttctagtcaagataaagataatagtgagccaagtactcaatctggtgctactcaagatgaaaacattgattctaacgcagctgttcaagagagaagcgacaactcagttactgaaccagcaaccacaactaatgctgaagaaaaagtagtggcaacaaatacccaagatactacgcaagataaagacaagcagacaaatgcgaatgaaactacgcaaaatactaccaatgtcgacaaaaaagatactgaagtaacgccgactaacgacgcaacaacagctacaccgaagacaaccgccaaggttaacgcaccggctgcaccaacagcaatgaaggcagcagctactgctgaaacaccagatccaacggttccagataactcagctaatactgctattatcaatgacaagaatagttttgaaaaaatttggcttgaaacatctactgcgcgggcccaggtctacactaccgttaagggaactgatcaaaaagtctatgtcagttcctatgcagaattcggtaagcgacttaattcattaatttttactaatcgctttgatccaaatagtctagaattacacattgaatatcaggtgttaaaggatagggttcaaaatttcattgtaaattggggagactggctccgactagataccagtagaattggtaaagatggtctaactttcactacagatacaggtgaaaaagtagcctatacgttaacaccaggatgggggggaagtacaaaacctatgatgaatggcttagtgaaggccaagatatgagtaagataaatgctcttaaaattggcaacaatttaaaggccgggactaacttcgtattaaccgttcccctaaaatatattggtagaactgatggcacaaagcaatttaacaatgttcaagttgtagattacgggcagccaaatgctaatatggtgttcgattttattgaattacatccagagcaaatcgatactccagaagctccaactactgataaagagtcagttactaccggtatctataacaatccgttagctactgctacagactggtataaaacggagcatggtgaatatgttgcatactatacagctaaagggaaagatggtaagacctatgtaactggatatgtggctgccaatggtaagtctgagtcgattatcaatgttgatcagattgatctaaataccttggaataccatatgatttaccgtaatggtgacgaagaagtagcggccggtatttcagcaagctttgctgatggtaagactctagtggttgatgctagtcgtataggtgctgatggtatccgtttgaagagtcaacagggttggtcttataacaacgggggttatagagagaatactagtgggagactctattatagttgggaagattttcttaagaaccataacggatcggtagataacctcgttggcatcaatatgaatgcatccgctttcaagccgggcgatacaattgaagtagttgttcctgttaggtatattgggaaactttctgatcaagttcaatccttagaatttaaatctgaagctagaaaagatgtttcggttaaactctacttcacaactgtgcgcaaggacttaagccaggttaagcaggtagtcttgcttccgactgagttcatgggagaacaacctggtcaatcaaactggaagctggttaaggaaattgaaaaagatatgccaaatgggtgggaggccattaaaattagtaacttcccaacctataagggatcattcaatatggattcactaccaaaaggggacttaccatcggttgtttatggctctgcgcaatactttgttgacctccaagaaattcagaaaatttttgctaaccatggttacacggtcaagtatgctaacaacaacggtaaagctcaggaaatgccattctatggatacgttaccctgccactggcccttattgatggtggtggtaaacctgttgccccatctatctggacaatccaagttcaagctgtgcctgctattattttaaataaagatcaacactatgtggcagatccgaatgctaagccatgggacaccacttcaatgattgatgagatttatgctgctgatgacgcaggacagcggaagacgcgcgatcaactagaaaagttgccaaagacggacgtggatattagttatgaataccaagctccaggggctgctacagctgctccggttgataaggtcgacttgactaaggcgggggtatacactgtcacttacagtcatacttatgctgatgggcgagtagttaaggatagtcgcaaggtttatgttgatgatgttaagcaagaaaccaaggacattactcgaacaattattgtccacgagccaaacggaactgaccaaacagttatccaaaaagcaacattgacacggaaagtaattcttgatgcaactactggggaaatcaaatctgtgggtggatggtctactgctaagtgggaaagatactcagctccagaatttaaaggttacactccagccccggctcaaattgatgaaactgctgtgaacaaggacactcaggatacaactgttgagattagctatacagctaatgagatcacaaagccagaaaccaaggacattactcgaacaattattgtccacgagccaaacggaactgaccaaaaagttatccaaaaagcaacattgacacgggaagtgattctttatgcacctactgggaaaatcaaatctgtgggtgaatggtctactgctaagtgggaaagatactcagctccagaatttgaagattacactccagccccagctcaaattgatgaaactgctgtgaacaaggacactcaggatacaactgttgagattagctatacagctaatgagatcacaaagccagaaaccaaggacattactcgaacaattattgtccacacgccaagcggaactgaccaaaaagttatccaaaaagcaacattgacacgggaagtgattctttatgcacctactgggaaaatcaaatctgtgggtgaatggtctactgctaagtgggaaagatactcagctccagaatttaaaggttacactccagccccagctcaaattgatgaaactactgtgaacgagaacactcaggatacaactgttgagattagctatacagctaatgagaccccagagcaaccagataacagcaaggacaaaggtaataatgacaacaatggtggtaacaattcagatgcgattgtgccaataaatcctagtgacaataactcaaataattcaaataatgcaccaactgacaataagaagactgatgacaccaagaaagataatactggcaagaagattacaaaggagactcctaagaaggtaaagaataataagtctaacaagaccaaatcaacgactacttctaaatctaaccagtcttcaaaggctaagcgaaccactaaatctggtacgattagtcctaaggcagtcgctttagctaatactactgctggtctagctacttcagctaaggcaaatatggaaaacggtattgccaagaacaacagccaaaattctcaaactttgccacagactggtgaaaatgaaagtaaggtagcatttgccgttgccgggttgttagcagctgctttgggcatttttggtatagctattaatcataaaaaagaaaattaattagctaagttgaataaatcatacaaaaagacgcatagaatagcaatgtcattaagttaagacattgacgaaaatcagactttatgaaccgaattattttggctctttgtcaaacaccctaaagtataaaggtagatagaaacatgacgatgtttttatctaccttttttcttatacttagattgagcttgcggttgaacccttcaaggcagccgttagaataaggcagttttgctccattaagcacagcttttaggttatgtttaaaggtcaatagtgttttgtgcattaaagtcccaatttgatcttggcagttgattaataagttgagctcatgagtattgcccgtttcaacggcttgaataaagctttgcatcaggttatatgaattctctaaggtagtgctggtattgatgccttctgtaactacttgtgcttgagttaagcagtctttgtagtgccagttatagtgaggatgaactttttcaagttcatcaaacttcttcaagtataatttccaaggagacttaagcagctgatattgccgcgatcttttatcaaaggtcttcatgacttggaccctcagcgagttgaatgagcgcgtaagcatttgaatcatgtgaaaacgatcaatgacaatctgtgcattaggaaaacaagctctaacgatatcttgatagtaaaaattaagatccatcgtgaccgttttaacgttagctctagcttggagcgagaaacgaccaaaatacttaagcagcgtcttcttgtagcgagttctaagaatctgaacgacttgatgattatcaccatccaggcagataaagtgcagctggcggtaactcatcaaaagctaaatgagctggcaaatattcgtagctgtcaataaaccggtgtgaacagttgcccagtactctttgaacagtattaattgaaatattgttttctctggcaatgctggtcatagatcgatcttcagttaaagctgacaacactttaagcttagaggcattagaaatagaacagtatttaccaattcagactgagccatagatcagcgctcacaagtgcgacatttaactcgttgcttagctaatcttataatgaccggtaagcttgcattagctgtcggatagtgaatgttggtaatcaaatggccattatgtaagagatctagggagccgcagaaaggacaagcaggttgaagcaattcagcttcatagattttatgcttttgcagtttgatcgatttatagaaatcacctttatttataagaatttgtgtggaaacgatttttattgaagaggactatgtcctcttttttgcaataaaaaatcctgttaacagcttatcatatagataagtcatcaacaggaaaaattatagagccaatattttgagattaattgataggggttgaaaagtaaattttatttgttatagaaaatatagaaaaaggattgttcaagaaattattttacgaaacctgcagtgaaccaagtgttggcactaggcttaagtgaccagccagtgaccttcttgttaacagcagtgattgagtattggttggtagttggcacaacgtatgcttcatcatacatccacttttgccacttcttgaaggcattagcacggtaagtaggattgaaggccttctctgagtcgatatcagccaaaagcttagtttgcttaggtgaaacgaaacgagcaaagttgtatggtgcagcttcattgtaaaggtcgttaggggatggttcacttgaaagtgaccaaccaccttcgaagacgtcgattcttggatcgtcagattgaacagcttgtacccagttgttgaattccattggacggccgccgacaaatttaacatccaaaccaactttcttccattgttggatgtagtttctccaaacaggttcagcggtagttgagttgtttctaacagccaagttaattactaacttcttgccgttaggttgaactctgtattcacccttcttcttgtagccggctttatccaataattcgttagccttcttcaagttgtatgggtaacccttgattgacttgtcagtataatcaccaaattgttcagggatcaaagtgttaacgcggaaggccaagccgtggtagtaacgtttagcgactgcatcaacgttcattgcataagccattgccttacgcaatgatggattgtccatcttggagttcttgttttcaacgttcttgccagacttcttatcccatttacctaccttaaagcctaagtagttgtaggataggggaaccttaccaatgaagttggtatcagtagcgttcttaacatcatcccattgggtgttaactacgccagctacgtcgaacttgtgactcttgatggcttgagtaactgagttggtaccgatgactgtcatggataccttttccaagtttggtgtaccacgccagtaatgcgggttacgttcccaagtgacagattgaccacgaacaagcttgcttacgcggaatgggccgtagaagagtggttgttttctaaccttgtcactagacatcaacttggagaatggtacgtcctttaagtaatggtaaggttcagcgtattcctagaagtaaccgttacctgattgaagcataccaggcttcatttgtttaaagtgaattacgaccttgcggccatcttcgccatcaggcatctcaataccagaaatcttcttgctcttgccttcgtgatattctgctaaaccaacaatgtcggcaagagaatcggtataacgttgtgacttggagtttttattagcgataatttcataagcgtattccacgtctttagcattaacttgcttgccgtctgaccacttaacacccttcttaacctcgatagttacggtcttggctttacggtcaagcttaaaggtagcagcacctttattgttaatcttgtattgatcgttgactgagaataacccttcttgtcctggctctgcaacttcactgtcagtggcagtatcagataattctggcaagaaaataccagtgaagggactatcagattcgatagcataatttaaagtgccaccttttttaacacttttcacaggaacagtttgactgaatttgtgatgtgtttcatctgcattattattttttgaatttttattattaccacaggcaaccaaacttaaagctgccccagaaacaagtgctaatgcaccaaaatatcgttttgctttactcattcaaaaagcacctccaaataaattaaaaatatttaagttttattctatgatattaaaatgaaaaaaacaatagaaagatgaataaaaatgtgaaaaatattatttttaaattatttttgaagctaagattagttttctttcttggctaattaggcatagaataaggaaataacagctttttatgttggaggaaaatatggatacagcctggcaaaaatttaaaaataatattccattacgtcgatttgtggtactgctattaattattgcctgcctttatgaaatacgagcaatgatgaacacagtattattaacttttatttttacttatgtgatcgtgcatttaattcatctagtgcagcggtattttcctaaaataccaacaggcctaattgttgcggtaacatatctaattatcttggcgctactttatttcgtggttaccatttatttgcccatgttagttggccaaatatctaaaatggtaaagtcagtgatggcgttttatgaatcaaatgaatcatcgcgcttagccagccatgtaacgcgttatatcagtaaaggtgagattgttacgcaggcaaaacgagttgggacttttgctctgcatacggtgaccaattttggtagtttaacaattgctacctttatgtcattgattttgagtttcttctatacgattgaattagatagaatgattgaattttcaaagttatttgttaaaagtggttactttaaatggctttttgaggatattcgctattttggtaaaaagtttaccaatacttttggtgtcgttttagaggcgcaattctttattgccatttgtaatacggccttgacgatgattagtctggcatttatgcatatgccgcaaattattgccttaggcttaatggtctttattttaagtttagtgccagtagctggtgtgatcatttctttaattccattaagtattatcggctattctgttggtggcattcgttatgtgatttatatcttcattatgatcatgattattcatgcaattgaggcctatgtgttgaatcccaaatttatggctagcaagactgaattaccaattttctatacttttttagttttgttagtagctgaacacttctggggtacttggggcttgattgttggtgtaccgatcttcactttcttgcttgatgtcttagggattaaatcggcgaagaaaagtaaaaagaaagcgaataaataatgagagtacttttgacaggtgatagcattattgcacgccaggaaggaaaaaatgaaccgcatcttaattggaatttgcaccaattattgccagatattgaaatagaaaataccgctgtttcggggattaactccggggccttttttgccaaattaaatgaattagtactaagcgtaaagcagtgcgataatttggtgatcttgctgggaaccaatgatttggctatgcacaaacaagtgccagcaaggcaatttaagcaaaatatggaaattatttcctcggcaataatttgtcaatattacccaccacatgttctgcttgtttcgccgccagctgttgatgaagctaagcaacgtgtacggaataatacgttagtagcggaatatgctcagatcgtgaaagaagtagcacatgagtatcattttcgttatgcagatctggcacaagctatgcgggatactggcgatttaagcgagatttgtcaaggagtaaaaaacgatggacttcattttggtgatcgtggctatgagattttaggaaaactaattgctgaaaatttgaaacaaatgtaaaaaggaccgcaatttgcggtcctttatttttcgctattttaatgttgcccaaagcaagcttccagctagcgcaatggccaagaacggaatgagcaaataggcaaaaaagaaaaacataattcctacgactagtaaaaagccgataattttaatgaggccaattcctaatttaaagaatagccagagtaagagtaatgttaataataaagaaagcatattaatacctccataaatctatgagagtattttactaccaaattggacgaatagaatagtaggaagattaatgctttagaaaaatttagttaccggtaacaagataaattatattgaaagctctttctgtaaccgctatatttcaactattgaaagcgatttaagaaacgagaggaaaaataaatggaggagaaaaaaactgggttacctacgctagctagtacgacaatttggatgattagtttggggtatttgggtgtgcaaatcgcctttactttggaaacatcacagatgagtcgaatcttccaaacattgggtgctgatccgacaaaattaggctggttctttattttaccgccgttagctggattggtagtgcaacctggaattggatcattatccgatcgaacttggattcctaagattggacggcgtttgccatatttattagtcggtatgatctttgccgtaattactatgattttgttaccaaatgttggtagttttggtctaggctatggttcaattgaggctctaatatttggtgctgttgcaatcgcgatattagacgtggcatcgaacatggcaatgcaaccatttaaaatgatgattggtgacatggtcaatgatgaacaaaagtcatatgcctatgggattcaaagcatgttgtccaactttggtgctgttattgccgcatttttcccgttcttattaactagtttgggtgttgctaatactgctaaaaagggtgtggtaccacaatcagtaattatttcattttatgttggtgctgccgttttagtcattacatcattgttcacgatattcagagtacatgaatatgatccagaaacctacgctcgttatcatggaattaaagaatctgataatcaagaaggcggtggttggattgaactgcttaagaaggcgccaaaagtcttctggcaagtgtcattagttcagttcttctgctggatttctttccaatatttatcaacttacgctactggtgctattgcacaaaatgtttggaatacgaccaatgcctcctctgcaggctaccagattgctggtaactggtttggtgttttaactgctgtacaatcaattgcggcagtagtttggtcatatgttttagcgaaggttccaaataatcaccacaagctaggttacggtatcagtttgctactaggtggagtaggatatacttcaatcttcttgattcattctcaggggtttttaattctatccttcattttaattggtatcagttgggctggtatgaatacttatccattgacgatggtatctaatgctttatcaggtaaacacatgggaacatacttaggattgttcaattgctcaatctgcttacctcaaattgtagcatcactgctcagcttcatgattttcccaatggtgggtaactccatgccagcaatgatgttgattactggtatttcaggcttcttaggcgctttatcagttttagcaattaaggaaacctacgtaaaatagcataatttttccgataaaaaaaacactgcgtgcattgtcaatgtcattaagttaagctattgacattggagaaaaaacaattaaagcatcatttggctttagatagccaatttgatgcttttttgtgtacgccaaataagcgtagtttgtatttcttttttattaggccacgcgatacatgtaatatactgcagacttggcttttaaatttcgtttgtcttttcgcctttatttttgcaaaaaaaagaatcgaatccaaatgattcaattcctaaaaagatcagttttcaaaagtcaatagcttaacttaatgacattgcattttgaataactgcggagatttttggtataagtcccttaacgatgacttcggctcttattataataagaaaatccgcaaattcacagtgttcatattatagctgtcgttcactcttaacttataatcctaaaataacgttctaatctgtgaagtattgcagaatatcctcctcagttaggcgttttttgtcgtcgcctttgacatcaaaaacgattctaccattgtttaaaatgatagtgcggtttccgtatttgattgcgtcttttaattggtgagtgatcatgacacaggttaaatgctcttcttgcacaactttatcagttagttcaagcaattcgcggctagtatttggatctaacgccgcagtatgctcatctagtaagagtaaatcagggcgcttaattgtcgccattaaaaaacttaatgtttgtcgctgaccaccagaaagattacccacaaaagtatttaagcgttcatttaacccattagggagttgggccgcctggcgtttaaattcttgcatatgtttatctaggcctcttaaacgcagaccgcggtgttcacctcgtttggttgcaagtaataggttttctgcaacagtcattcgcggagctgtacccattttaggatcttggaatacttgggcaatatatttagcgcgttttacttcagaaagattggttaaatcttggtctttgagcagaatttttccgctagtaggaaaaatagagccattgataatatttagtagcgttgatttaccagcaccgttggttcctaaaagagtaacaaaatctccatcttcaagttttaaattgatgtttttgaggatttgcttttcctcattggtaccagcattaacagtagtagtaatattttgtaaatcaagaatagtactcatggtttttcaacgcctttctttaataacttacgagtgcggaatttttgttcaaataatggaagcatcatgcaaatagcaagaataatagcggaaatcaatttaaagtcgttggtactaaagccaagttggaggactaggagtaagataaggcgataaataatactgccgataacaactgctaccaagcgggcggttaaacttaaattaccataaacgacttcaccaataatgatggcagctagtccgataaccatagtaccaatacccatattaacgtcagcgtaaccaccgttttgggctaataatccaccagctaagccgatcaagccattagaaagcattagacctaagattttcatattatcggtattgatcccaagagattgggccattttttcgttgtcaccagtggcaataaaggcttgaccaagatcagtatcaaggaaaactgctagcaaaacgatgacgataatggcaatgatcaaaccaacaacaatagtaggaaaattgatcggtaatttttgtaaaagctgaccgtttagtaaagtatttttgttaagtaaaccaacattagccttgcctagaattctaagattaactgagtagacgccagtcatcgttaaaataccagctaaaagaacaggaatttttcctttagtatatagtaagccggttactaagccagtgaccatgccagcgaagaaggaaagaatggtagctgctaaaggattgacgccatgaactaaagcactaacacaaattgcggcaccgaaggggaaggttccttcaacagtcatgtctgggaaatttaaaattctaaaagttaggtagaggcctaaggctaaaataccccagagtaagccttggccaatagaagaagtaattaagctcatttgataattcgtcctttcttttgggcagcttgaattacactgttaggaatagtgatgtttaattcatgtgctgctttttcattgattactgtttcataatgggttacgcgtctgactggaagagcagcagggtttttaccatgtaaaatttgtcctgccatttgtccagttaagattcccatgtcgaattgactgacacacctggtagcgagaccaccacttttaaccatagtatcggcagcaggaaaaactgggatcttggcactgttagtagcctttaataaggtggcaattccactagctacagtattgtcggttgggacataaactgcttgaaccttgcctaccatggtttgggcaacttgttcgatatcattggttgaagtgatagtgtaagggataactttaagtcctgttgcttcagctagtcgtctgaattcacggtactctgatgctgatgaatcatcacttgaggtgtaaatgacaccgatgtttttggctttaggtagaatttcttgcattaaggccagctggctggcgattggctggcggtcctggacaccggtaattttaccgccgggatgcgctaggctttttactaaatgggccccaagaggatcgctgaccgcgcccataactacagggatgttgccagaagtattagctagagattggacagcaggagtggcaattccaatagttacagtcgcattttcctggctaaaacgatcgctcattgatttcagattactttgatcaccttgggcattttgaaaatcaattttaagattttttcctttgacatagccttcatctttgagaccctgaataattcctcgatgaatctgatctagagcggggtggctcattgtttgcaagataccgacagttggcgttttcttttccgcatttttcttatttacttcactgacaaatgcaactgccagaaaagcaaaaagagcaataattgttccgattaaccttttcattctttttctccttcaaacaaaaaaggcacttccttttttcgggaaatgcctaaaacaaaacccgcacgttattttccgtgcgagcaatatttcttgaagattttaccagcacagatacgatcttaatgagtcgcatctgtacttcacgaacagaaacaactctagtgctggaattgccaacgattgattgctgtaaatttaatcatgataaaatcttcctttcgttcaaatttgttagctaaattttaagtaattatgagaaagatgtcaaatgattttttgttagatttatttagttttgaataatttttaaaatgctataataattattccggcaaccatcataaaaagaagggaggaattctcttgcgctatcaacaaataatttttgatgtagatgacacaattatcgattttgcggcaactgaagattttgctttacatagcttgtttaacgctcatcactggcctttatctgcggaattgcagcggcagtatcattcttataatcaaggactttggcgccaacttgaacaaggtgaactaacttatgaagagttaagtgaaatgacttttcatgattttattttggatcattttggcattgagattgatggcaagaaggcaatggatgaatatcgttcatactttggtgaagcacaccaattattgcctggggttgaagatacgttgaaatttgctaaaaagcagggctataagctgaccgttttgagcaatggtgaaaaatttatgcaaaatcaccggttggagcttgctggggtgaaaaaatattttgacttaattgttacgtcagaggaagcccattattctaagcctaatcttcatgcctttgactatttcttcagtcgaactgagatcggtcctagtgagacagtcttttttggggacggcctacaatctgatattttaggtgcagaaaaatatggctttgatagtatttggtacaatcatcgccatcgtaaaaataccttgcatttgcatcctaagtttgtagtagaaacttatccagaattggttaaattaatgcagaatgattttgagaagaagtactaatcattatactttttgctcttcaagaagatgccccaaccaatagttaataagctgacaaaaattattaaaatccaaaagccgttttcattttctttacctggtaagccgccgacattcatgccccaaatgccactgattaaagcgggaagagcaattaccagggcagctgaatctagatatttcattaaatgatttaggtgactgtccatcatggcggtaaagaggccgctaatggaattgagcaagtcagtgtaaacgtgaatcattttggtaattcgtttttgcttggtcatgatacttttgacgcgggcttgatttgctagcttgttttctactaaataattaccaaattcttctagactaggtgtttgatcatctaaggtatgctttaagtaaactagctggcgagttaaatctgttactttttttaattctttggtcttagttgttcttcttgcagcttgatctaaatggtcaattttttgtttaattgttactaattctgcatgaagatgcttgatttggatacacaggctttgaaaaattgtttcaataatattttcttgcggttttaattctgaaagacttcttgttgtgccaataaagagatgattttggtcaaaaattgtaaaaattggaattagctcttgttcaattggcaagtcattacttaatagatcgaaactcactaataagtgaccattttttagtttattagaatcaatagggataaaacgagcaacctcaatcgaggaattagggtaagtgaaaattgtaggatctagatcccattttttgattaaatgatcgatatcgttttgcgtcaattgatcttttaaaattatattctgactattagtaagcatatttgttcacctctgtttcttttttagtttaagattaacatgtaatgttttttagactgaattaagttgacttgaaaatatgtttttttaaaaaatatagaaaggtgagaatatggaattacattcacttactgatacttatactttgaacaacggcgtaaaaattcctgtaattggtttcggtacttggcaaacaccaagtggagaagttgcaagagaatctgttgaagccgcacttgaggcgggataccgtcacatagatactgctgcagcttacggcaatgaagaaagtgttggcgaagcaattaaacgtagtggcgttaaccgccatgaattatttgtaactactaaattgtggaattccgatcatggttatgacaagactaaaaaggcaattgatactagtctagaaaaattagatttagactatcttgatctttacttaatccattggcctaatcctgtagctatgcgtgacaactgggcagagcttaacgctgaaagttggcaggcgatggaagaagcagtgaaggctggcaagattcgcgcaattggtgtatccaactttagaaagcatcacctggatgaattaatgaagactgctgaaattaagccggtagttaaccaaagttacttgaatccgagtgatttgcaaccggaagtaacggccgcaagcaaggaatatgatttgcttaatgaggcttacagtcctttgggtacaggtggtttattaggcaatgaggtagttaatgcagttgctgaaaactatggtaaatcaccagctcaaatcttgattcgctggtccttacaacatggctttttgccattgccgaagtcagttcatcctaagtatattgcggctaatggtgatgtctttgactttgagattagtccagaagacatgaagaagttagatggtttacgtggggcaagtaagttggctaatgatccggatgaggttaacttttaatttaatttggaataaagaaaattgaattatcacaagaagtatcttatttttgaagtaagatacttttttattaggtgagacaatgaagaaaattacaacaggaattgtagctcacgttgacgcgggcaaaacgactctttctgaggctctgctgtacaaggcaggaaatttgcggacgctaggaagagtagacaatggggatgcttttttagatacagatcaattggagaaaaaacgtggcattaccattttttctcatgaagctaaattaacgactgatgatttagaaattacgttgttggacacaccgggacacgttgatttcagtgcacaaacagaagaaacgctgagtgtacttgattatgctatcttggttatttcaattacagatggtgtaactagttatactcgcactttgtggcatttgctcaagcgatatcaggtaccagtttttatttttgtgaataaggttgatgcgataggcgctgatcgagggatggcgttggttgatattcaaaagaacttaagtgagagttgcgttgatttttcgaagattgatgatgaattttatgaaaatgtggctgccacaggtgatgccttgcttgagaagtatttggatagtggtgccatttatgatcaggacgtgcagaatgcaattgtgcagcggaaagtttttccaatttattttggttctgcgttgaaattaacaggaattacggaatttttggctggttttagtaaatggactaaggaaaaggaattctctgataagtttgcggcacgatgttttaagatctcacatgatgctaagggtgaacgcttaacttggttgcgaattttgggtggcagcttaaaggccaagactgagctagctggtgagaaaattaatcagttgcgtagttataatggtgaaaaatttgcgactattacagaagcagctgctggagaaattgttgctgcaacaggattgactaagacgtatccaggacaaggattcggcgtgggggatgcaccaactgcactgcttaagccagttttgacctataaagttaatccccaggataatgatcttcacgcttgcttaaaagctctgcaaaccttggaagatgaagatccacagctgcatgtgacttggtccgaacatttgcaagaaatccacgtgcaagtgatgggaaagattcaattagaaattttagaacagttaatgcaagaacgttttggtttgaatattgtttttgaacagggaagtattctttatcaagaaacaatcactaaaccaattgaagcagtaggccactttgaaccgctacgtcactacgcggaagttcatcttttactggagccactgccacgtaatagcggtattgtttttgaaaataaatgcagtttagaagttttgactaaaaattggcaacatcaaatcatgacggcattgaagtctaaagaacatcttggtgttttgacagcttcgccgattacagatatgaagattaccttgatcggtggtaaaggctcaattgcacattcggttggtggcgatttccgtgaagcaacttatcgtgcagtgcggcaaggtttaatggaagaaaagatacgccaacaaactattttgctcgaaccgtggtatgattttcgcttagaaataggaaaagatcaggtagggcgtgctttaaatgatattcagcgcatgaatggaaaatttagtacgcctgaaaatattggtgaacgaacagtcatatccggttctgcaccggtagctgaaatgcaagattatgcgacagaagtgcgcaattatacgcatggtgaaggtaatcttgaatgcgtagtcagtggctatttgccttgtcacaatgcggcagaaattattgaggaaaagaattatgatcccgtttctgatctggagaatacgcctaactctgtcttttgttcacatggtgcaggtcacaccgtcacttgggataaggtgccagagactgcacaatatccttatacttatccattagattagcatgataccatgaattgtttatcttgttacatgtgaaacattaaaaatgcggcatagtgcttttcttattaaaaagtgcaacttgaaataagcgaaatatttgactagttatgaaagaaatttcattttattagcaaaatactgctagaaaatcgcttgcatagtaagataaaggtacgatagaaaggtgataaaacatgacacaaataccttttaaagctgtagcggttgatctagatggcacttttttgaccgaaaaaaagacttttgatcatgcgctatttgcaaaagttttacgaaaattgcaagctaatcaaataccgtttatctgtgcaacagggaaccaactaattcgttcgcatgaatattttgacgagtttactaatgaagtagattatgtgtctgaaaatggggcaattctagaagccgatggcaaagtatttaagcggattgcgattgactatgatactgcacaaaaattgttacattttattcaaacagaataccctgaagcaatcattatggttagcgcacagcatcattgctatattttgacgagtatggatcaagcggataaagacgacattagaatttattatcgtgatgttcaggaaatcgatcagtttactgacattgatccagccgatgcgatcttgaaggtttgtctgacagctgatgatgaactggcgcaggtgattcaggatcggtttaatgaaaaatatggtgactgtattcgcggcactagcagtggtaatatgacaatcgacttggtgcataaaggcattaataaggccaagggagtagacgatatgcttaagcattatggcattgcgcaaaaagatttgattgcctttggcgatggcgaaaatgatattgatatgcttaaggcatgtggctatagctatgcgatgaaaaacgccaatgcgaaggctaaggcggtagcaaagtatgaggcgccaacgaatgatgaaaatggtgttttgaaagttttggctaagtatttagatattgattaatttaatacgcaaaaaagacttgagaagtaattttcccaagtcttttagtttgctttattaactgctctgaaaatattaagtccgctaattagaatgatgaatccacaagctaaaatcagaaccgtttcaccagagctgtctaacaaaattccggcaacaattgaactaatcggtccaccaatagaggtactggtacgaatagtagttagcactctgcctaatattttatcgtccgcagtaatctgaatcaatgattctgccaaaatattgtgaatactcgtcattagcccaaataagaaaattagtcctgtgaatatcaaccaattgttactgaagaaaattatcaaaagtaatggtactgcactagctatccaagtaaaaccaattgtttttacccgtacggataatcttcctgcaatagttgcacctattacaaagccaatcataaaactgatatagaacatactgtatagtcccgcttgaccattttgttgagcaattcttggcaacagaatggccattgctggcgtcacaaaagaatacaggattgaggaccagaagtaatgacttaagaaataatttgttttaataaacttatagccattaagaatttgattgaggtattttgcctctgcttttttgactttaggtctatctttaatttcttttagggcgtaaaacagaaaaacaaaactgattaggctcagtagactgcagatcaacattacattagctgaaattaaaaaagttaataaaaatccagaaagagcagttcccgctacattcacaagctggtcgatgttgctaactttagaaattagattatttaattcttggtcatcagccgttgtttcttttaaaatagcccggtcagctggattaaaaaattcatcgcagacagatactattcctgcgcagattaatgccaaaatataacttttgctaagttggtaaactgcaattgttgtggcaaataggaaaacagtttgaacaagaattgaatagtaacttgtccttttgaatgaataatgatcgataatggggccgtagaatattgataaggcggcagtggtggaaaagatggcttccgcaattccgacgacaaaggaacttttggtggaagtttgcagccaccagataaagaccatgctgaagagggaattagctagtccgccaacggcacgcgagaaaaaatatgatttcttttttaacattttatttatcctattctcatttttattttccaattataccaatatttttccaattaggatcaatttaataaaaatagtacaaaaaaagacttgagaagtaatttttcccaagtcttttagtttgtcttaatttaggttaattaaaacttgttcttgtccaaagcaactggagaatctggcttttcaccattgatcatcttcaagttgttgtcgaatgccttaacaaccatgttacgtacggcgtgggtggtgtagaaggcggtgtgtggagttaccaaaacgtttggacgatcaattaagtcagctaaacgcttgtctgggaattctttgccttcccaatcttcgttaaatacaccaacttcgtcttcgtaagtatccataacaaagccaaagatcttacctgagtccaaaccgcggataacagcgtcagtgtcaacaagtggaccacgtgagcagtttacaattacaacgccatctttcatcttggcaattgattcgtcattgatcatgtgtacatttgctggaacatctggtacgtgaagtgaaattacatcagcttgcttgtacaagtcgtcaagtgagtcaacgtagtaacccttcttttcgagttctgggttcttgaagatatcgtaagcaatgacctttgcgccgaaaccttccataattctcataaatacttgaccaatgtgaccagtacctacaacaccaacaacttggtcacgaacttcacgaccaatagtaggtgcccaacgtaagtcgcgcttagccatcttttcgtccatacgcttgtcttgacgtaatacacgagcagcttggattgcagcatgttcagcaatagcgtcaggagagtatacaggaacgttagtaatttcaaagccaagttccttagccttgtccatgtcgatgttgtcgacaccaacgttacgtaatgacatcttagttacgccagcgtctgccaatgcttgaagagtttctggggtgtagtctaattgttggtaaacaacaacaccgtcagcacccttagctaacttagcagtttcaggagtcaaaagcttatcagtgtaatctacatcgatatccttgtgagcatccttccattcgtttaagaatggttcttcgtctttacgaatagcgtaagcaaaaatctttgtcataaatttaacctccgtaaaatttattagtatgaccagtcctcattatacgcttttacttgctcaacaaaacacaaaagaaccatttttttgtatagattttaagaaaaataaaagtcaagttttactctgagcaaaaaagttgcaattttttcaaaaaaagtttatagcctaaaaattgcaactattattaactgttacctaatctcaatcccatagatatgaaaattatttttgtatatagcaatattagttaaaggtagtatatggatttgtataagagacgcattttcgttatataacccaggttatataatggactttaagtagagaaacaaacatagcggaggaaaattgaatatgcattttaaaggagaaagccaacagcatttcagcctaagaaagctgacaattggtgttgcttctgtaataatcgggaccacctttatgttttttggtggtcatgctgttcatgcagatgatttaagtagagatgctgagcaaaccagctcagttgttcaaaaacagagtagtgagaaaatagatgtagatgcagtcaaagaagctgataatgtttcaaatcaaagacaagacttacccagacggtactaagagtaccgcaactgttcctgtaactgtcattgcaccaaatgtaccagacgttatctacgtaccaaagggtgacaagtttccagacccaagtactgtagttactaactctaacgatatcaaggacaagattcctgacacgacttacacttggaaaactactccagatactccaaatactaaagtagtaattaactataaggctaataatcctggtactccagataccccagttactccaccagtggatccaggcgataatccagcaaccccagttaccccgcctgtaaagccagagcagaagccaacaacaccaactcctcatgctactaagacaccagcaaaggataatggtggcaagaagacagtagctagtgagcaaaaatctactttgccacaaacggggaagaaggataacgttgctttgactgctatcggtgtagctattgcagctgctggaagcttattaggattagcagatagcaagaagcatagatcttaatttgtaatatctaatttctgtttactaagaagcaagttgactcagataggagctagcttgcttttttgtctaaaagtttaaggatttctaaagacaaaaagcaaatagtgacgcattgtcataaagctgatattatatactcataacaaaaatacaacgcatcaaatagagatgaattgtaagaaggtaacaaatcttctaattccttattaatacatcctattgggcctttattaattcatacattgggtattgctttttgctggttgtcccctatgcaaccgcgaaagttaagattgataataagtccatcccctttttgcgaaggtaaagagtcaagaccccctgcaacatctcttgcgttgaatcttttgttaatcttgataatttatcttcgcaacattagtgatgagtaggctaatgtaaaaaaatctcgttattctcattcaacacaactcccttaaaagggctggtttagaaaagtcatctaaatcagtcctttttctttttttcgttataattaaacttgagaactaaaacaaaggggaagaaaaatgatcttaatttcatggaatatcgattcattaaatgcagctctgactggtacttcagctagggcggaagaaacgcggcaagttttaactaaaattcatgatgccaatccagatattattgcgattcaagaaactaagctgcgtgcaactgggccaactaaaaaacataaagaagtgttggctgaaaagttccctgagtatgactatgtttggcgctcttcagaagaaccagctagaaaaggctatgctggtacaatgtatctttataagaaaggattaactcctgcagtgtctgagccgattattggcgcccctgagccgatggatcatgagggacggataatcacactggaatttgataaatgctttgtcacccaggtttatacgccaaattcaggcagtggtttaaagcgactagctgaacgtcaagtttgggaccaaaagtatattgaatatctgcaaaaattagatgaaaaaaagccagttttagctagtggtgattacaactgtgctcataccgagattgacttgaagcatcccgaaaataatcatcactcagcaggttttactgatgaagaaagagtcgactttaccaatttgctcaatgctggctttaccgatacctttagaaaagttcatggtgagattactggcgtatattcttggtgggctcaacgtgtcagaaccgctaaggctaacaactctggctggagaattgattactggctagtaagcaatcgcattgctgataaggtggtccgctcagagatgatcgatacaggcaaacgagcagaccactgcccaattttgcttgaaataaatctttaaattgaagcaagccctagtataatttctttttgaaatgtttttattttgaaaaagaagtaggggttgaaattctttgaataacgagaaaaaagaagattgggctttggagcaggatctgaagtacaatcgtctgacagcatttaagctattcgcgatgactagttcaatggttatttccgttgatgaactcgcaccatttggtaaaactggagcaacggcactgttttacttgttaattgctggaatcgcttggtttatcccgattacgcaaatggctggagaaatggcctcaattgatggctgggaaaaaggcggaatcttcacttgggtgaaaggatctcttggagacaaaacaggctggacagcaatgttttatcaatggattcatattactgttggtatggatacgatgatgtatgtgatcattggggcattgtctatcacatttgggacaccttggttcaacaccacgccaatcgtacgcttcattttaatgatggttattctgtggggagcaacagcgattcaggtaattggtgttagaaagattggtcgaatcgctgaatggctgtttattctggggattgcgacaccagtaattttattgattatttcattcttcgtatatgtgattcaggggcatcccttgcatatgacgattaactggaatactgtaattccacataaattgaatggtaatacattagttgcctttgtcccatttatgttggccttttgtggtggggaagcttctgcaccgcacgttaaaaacttggaccacatcaagtcatactcaaaagttatgcttggcttagccgttactgcaatctgcttcgacttgctaggtagtatggcaattggaatgactgtgcctaaggatcaaatagagaacagtacaggctttgtttatacctatggcaagctgttaacgtcaatcgggctacctggtgatctgttgcaaaaaattgtgggtataatgttagcctgcggtattattggtgagctaggcaactggattgctggtcctaatcagggaatgtatgaagcggctaaagagggctatatgcctaagttttttgctaaaaccactaagcacggcgtgccattaagaattatggttttacaatcaagtatcgttaccatttctgcattattgattacttttaccagtggtgccgatgcagattttgcgtttaacgtttcattggccgcaacgacggcgcaatatctcatggtttatatgattatgttgattgcttacatggttttgaaaagaaagcatgaagattatcaccgtatgtattacatgagcaagaaccctaatttgagtattgcaattgcggtgcttgcattaatcatcacggttatagctttctttgtaacttttgttccagcacaaggcacgccaagcaatttgcgtcacgtttatgtttggaccttaatcggcatgtgtgccattgtgtcgattttgccacttattttgtatcgctggcatgaaaaatggcaatcacaatagaattaagaagcattcgtttttcaagacggatgcttttttagtagaatttgagagaggtgaataaaatggcggatgcgatgagggatgcaatattaaatggttttgttgatcaaaattatttaggaagtgaagaattaggtcctaaaatattagctaataatcagcaagagagaatctggcagaatttgcgccaggaattgtatagttgcaagtcctttacttgggcggttgcgtttattacgcaagacatgctagttccgtttaaggtgataatggcagatttagcgaaaaatggaattagtggcacgattattactggtgattacttgggttttaacaatccgcgtgtttttacggaattacaaaagattcctaatttagaagttcgtattgctaataaggcaggtttccatactaaaggatatttatttgatcatgaaaactatcaaactgtgattattggcagtgctaattttacacgttcagctctgctggctaactatgagtgggctttgaaagtaagttcaaaaaagcaagcagatttaacagctcaattagtggataaaattgcagatttgaaacaggatagttttgttttaaattcagcctggctaacagattatcgtaaaaattgggtaaagcctgagcgagttgctactgatcggcatcagacaaaaattttaccaaataaaatgcaaaaagcggctttaaaacagatagaagcactagttacaagtggtgaaaaacgagggctagtagtgtcagccacaggaacggggaaaacttatttaggtgcttttgctgttaagaaatatcagccgcggcgttttttatacattgtgcatcgtgagcaaattgctaaaaagtcattagaaagtttttatcgtgtaatcggtggaccaagatcggattatggcttattaacgggaaataggcacaatttacaggccaagtatttatttgcgacggtacaaacgataagtcaacctgagatgctggctaattttaatagcgatgaatttgattatatcttgattgatgaagcacacagggcagctgcaccttcgtatcagcgccttttacattattttaagcccaatttttggttaggaatgacggctacgcctgaacgaatggatgagcaaaatgtttaccagatttttgactacaatttggcatatgaaattcgtttgcgggatgcactggaagagaagatgctggcgccatttcattatgtgggtgtccaggattatgaagcagacggagtagtgattgatgaaacaacagatttacgctacctagcttctacatctcgagtagactatgttttaaaggaattagactattacggctattgtggaacaaaggctaaaggcttggttttctgcagtcgacaggatgaagcacgtgaattagctcggctttttagtcaaaaaggacatcccgctgtagcattgaccaatgaggataatcaaaaaagacgtaatgaagtggttgcgtctttagttaaaggtgagattgagtatattgtagcggttgacttgtttaacgaaggaatcgacatccctgccttgaatcaaattgtgatgttacgcaacacacagtcgagcatagtgtttatccagcagttaggccgggggcttcgtaaatatcctggcaaagattttaccgttgtgctagattttatcggcaattataaaaacaattacatgattccgttggcactgaatcaggatacttctcgaagcaaagatcaagctaaacgagaaacgcgtctgccaagctttattgatgtttcaacgattaactttagtaaaattgccagtgaaaaaattttggcttcgcttgatagtgtcaagcttgatgggatgcgtgaattgcggcagagttaccatgatctcaagaacaaactagggcgtgtaccgctactatttgatttttatcaatatggctcagttgcaccgattgtttttgcacaaaatcatggcttggcaagctatgctgactttttgggtaaaatgggcgaagacgttaatttatcaaaatatgaaaatgaagtgctgtcttttgtgactaaggaattacttaatggtaaaagaattcacgagttacttttgttagagatgctacttgaacaagatattgttaagcaagaagattatctagctcaattgaaacgacaccatgcttatgtaaatgatgaattgttagcttctgttgatgcgattttatcgctagatttttttgatattaagcagggaaagactaccaaaaaagcacaatatggtaaattgccgttagttgaacgtagcaatttatttgactatcaattgaatggttctctacgctctgccctagatcaacatgattttaagaatttatttgttgatgctattaaaactggtttggccttaaatcaggaatatgataatcagcgtcaatttactttatatcagcaatatgatcgtaaggacgcttgtcgactcttgaactggcctaaggatgtttcggccccgatgtatggctatcgtgttggtgagcaggacacaccaatcttcatcacttatcataaagatgatcatgaaaagcggaatgctctgtatcgtaatacattggctgatgggcgcagtttgcgctggtatactcgggtaccacggcatttagattctgatgaggtacagcgtttgcttaatacgcgagggatgaatttgcatatatttgttaaaagaagcgatgcagatggtaagcagttcttttatttaggcaaggcaaagattcaagctgattctgttcgcgaagaattgctcggtgttaagaaaaagccagctgtagggatgaacttaatgttgaaacatccactgagtgagtcaatgcatgagttattatttgaatagaccaaaaaagcctttccgcttaggaaaagcttttttaattgccgctaatattaattagatcttggtcatcttggttattatccttatcaaacattctaggcttgatgtgatctagaatcttagtcccgatatttttctgagcagtttcatcaccgctaacctggtttaaaaacataattattccatatcgattatctgtagtcattttgatccaattaccaaaatgagtgttgcttaagctaccataagcagatttagtatggtcatcatctaaatgaagccctccagaataattagtggttgcacttttaagatgagttaagtaatagaaatcggatttgcttaagatactaccattggttaagccgagctggatcttgtaataatccattggggtagtgaacatattgcctgcgcctggaagctgggaggcaagagtctttttaacgtattcagcgtcttggtaattttttttaccattattccagacgtaagagataggatcggttttccaactaggaatatcctgataaaggaatgtattagcaagccctaatttgttaatgatgcgattattgaaattgttttcgtaggattgtccgctgattttaataataattccggctaataaaagatagttggtattattgtagaagtaggttcctggtgtcccttgagtgccgttattagtattatcaatagcccaattgatggcgtcattctcacttaaaacttttccgcgatccaattcagtattggttgcttgaatgccagaagtatgggtcattaactgtccaatagtaatattatcggcgtttttaagattagggtaccaacgtgaaattttggtgttttgcgtaaatttttgactagtgtgccagttttcattcatcagctgaattatcattgctgctgtaacaactttttgcaaagaagcagttggataaactacgttgtcgttcccattaccaacttttttaccgtaccaagcgtagccatagctgatttgttgcggctgaccgtttttgataatgacgatactaccgcgagtattgttttgagccaaagtattgcggacaaaatttcgcatttcggttttaaagtatgaactggcttgaacttgtggtggttcagtgatcgcaaatgcaggaactgtcgttagcagcgcagcggtagctagtccaataattgattttttcaaaaattaaaaggcctcccttaaaaagtggtttgtttacattttagcgcgttctttgcatcggacaaactattatcttggtgaaaagacgtatttttagctagcttgttgaaaaagtgcggctaattttgctctgagtgcgggatcatgagcgtataaataggtaccgcggattcctcgcttgaatagaacgttgagtgaattcatgaccatcttctcttcatattctattttttcttttgagttggttagatcattacgctttttgaacatctcaacatctgtaattttgtctaaattaactttaagttgattggtgcggggaatcaggctgattggtggaccgataatgatgccagcataatttaggtcaaaaccttggcaagtatagatagaaccaacttcattgattgttgtaggaatttctgcccaaggagttgatgtgtagttgtattgatcccatggcagcataaatttcccttctttaatgtaatgtttgccaccatcaagagtagatggatagccggaagttgaaagaattcttgccaggccgtctgtttgatttctcttgacgatttcttgccgcattttttctgcatcagtaaaaatacgaaagtcgtagttgtgccacatttctttttttaagggcattaatttattatgtgtaaaaaagttaaaccattctattagactatctggtgccatcattctaaattgatgatgtagttgatagtcttcgtggggataatgatgagtaattgcttcaagtcgcttacgtgtccagaagcttttcattcgtaaaacttggttttcatcaaataccaaaatgataacttttgaccgcttaataacctcctctaattggttatcgtgataaaagttgttgtagtgatcaggctgagataagagcaagtgtgcttcatcaatgacgacaacatcagcactggtttgttttttgtccatctgattaataaatgaagttggccgcatataatttttcttatatagttctttaatcggcccagcaatctgcttatagacttttagcagttcagggtgatttactaaaaagtagttttgagttttatacagttggctgcctgtttggtggtttaatttttgcaactgatcaaaaagggcagaaagcactacacttttaccagtacctgcttcaccataaatagtgaaaacagcaggatgatttttattgctgcaatgtgtaatcgaaaaatgtaaaattttttgtacgagaagtgattgctcttggttgagctgatggtaaggagagagtttaaaacttgcttgattattcaatatttattcacctcgttttcaattataatgaatagaaataataatgataaaggaagaaaacatgactgcacaaaaaataattcacaatcggctatttttaagacaaaaatctgatttagctggcaaaaatgatttacaagttgcgataaacttgcgtgatacgctactagctaatcgtgggaaagctgcggggctggctgcaaatatgattggtcagactaaacaaattattgcgttttatgctggcccgcttccatttgtaatgctgaatccgcgtattattcaaaaaaagcagatgtatcttgctagtgagggatgtctgtcactagaaggcgagcgtaatgttcagcgctatgaagaaattactgttacttatcagaatatggagttagaaacagtaacgcaaacttttggtgactttatagctgaaacgattcagcatgaaattgatcattgcaatggaattctgatttgaatagtagaatatttacgtgattttgcaaaaaaagtaaaaaaaatttaaattaattttgcatggtttcagggatgaaaacccacaattttcgaataattagatttgatagaataaaatactttttaatttaatgcaaagataaagaaaaatatattacaacactacctagtgtatcgtgaagaacccgaacgaagagcaagacttgccaaagcggagaaaataaggtaaattaataaagtcgcttcgagagatgcgacgagagcttaaaaacagacatgcaaggaaagaaaacaaataaaaagaaaaaagtacttgcaaagaagtaaataagctggtaatatatttaaatgtcgtcaggtgaaagcagaaaaagcttgagcaagacgaaaaaaacaaatcaaaaaagttcttgacaaagaaatgatggtttgataaaatataaaagctgtctgctttgcaaaaaagcaagacagaggtagtactttgaaaactgaacaaagtttcgctaaaagcgtgcgggtgtaaaaacccaaacaagaagcgaagtcaattcgcaagcaataaatttgagacaaagatcttaaataaggaatgagcaatcattcaaactttttaaaatgagagtttgatcctggctcaggacgaacgctggcggcgtgcctaatacatgcaagtcgagcgagcggaactaacagatttacttcggtaatgacgttaggaaagcgagcggcggatgggtgagtaacacgtggggaacctgccccatagtctgggataccacttggaaacaggtgctaataccggataagaaagcagatcgcatgatcagcttttaaaaggcggcgtaagctgtcgctatgggatggccccgcggtgcattagctagttggtaaggtaaaggcttaccaaggcgatgatgcatagccgagttgagagactgatcggccacattgggactgagacacggcccaaactcctacgggaggcagcagtagggaatcttccacaatggacgcaagtctgatggagcaacgccgcgtgagtgaagaaggttttcggatcgtaaagctctgttgttggtgaagaaggatagaggtagtaactggcctttatttgacggtaatcaaccagaaagtcacggctaactacgtgccagcagccgcggtaatacgtaggtggcaagcgttgtccggatttattgggcgtaaagcgagcgcaggcggaagaataagtctgatgtgaaagccctcggcttaaccgaggaactgcatcggaaactgtttttcttgagtgcagaagaggagagtggaactccatgtgtagcggtggaatgcgtagatatatggaagaacaccagtggcgaaggcggctctctggtctgcaactgacgctgaggctcgaaagcatgggtagcgaacaggattagataccctggtagtccatgccgtaaacgatgagtgctaagtgttgggaggtttccgcctctcagtgctgcagctaacgcattaagcactccgcctggggagtacgaccgcaaggttgaaactcaaaggaattgacgggggcccgcacaagcggtggagcatgtggtttaattcgaagcaacgcgaagaaccttaccaggtcttgacatctagtgccatttgtagagatacaaagttcccttcggggacgctaagacaggtggtgcatggctgtcgtcagctcgtgtcgtgagatgttgggttaagtcccgcaacgagcgcaacccttgttattagttgccagcattaagttgggcactctaatgagactgccggtgacaaaccggaggaaggtggggatgacgtcaagtcatcatgccccttatgacctgggctacacacgtgctacaatgggcagtacaacgagaagcgagcctgcgaaggcaagcgaatctctgaaagctgttctcagttcggactgcagtctgcaactcgactgcacgaagctggaatcgctagtaatcgcggatcagcacgccgcggtgaatacgttcccgggccttgtacacaccgcccgtcacaccatgggagtctgcaatgcccaaagccggtggcctaaccttcgggaaggagccgtctaaggcagggcagatgactggggtgaagtcgtaacaaggtagccgtaggagaacctgcggctggatcacctcctttctaaggaagcgaaggatatggagagcaggaatgctaagagaagtatccagagcaagcggaagcacactgagaaactttgtttagttttgagggtagtacctcaaaaagagctagtacattgaaaactgaatataatccaagcaaaaaaccgagacaatcaaagagaacagattgtagagcgaccgagaagagaattcttgagtaaggtcaagtagaaaagggcgcacggtgaatgcctaggcactaacagccgaagaaggacgtgacgaactacgaaaagcttcggggagcggtaagtacgcagtgatccggagatatccgaatgggggaacccaatgcagagatgcattattgattagtgaatagatagctaatcaaaggaagacgcagtgaactgaaacatctaagtagctgcaggaagagaaagaaagatcgatttccttagtagcggcgagcgaagaggaaagagcccaaaccaagtgatttatcatttggggttgtaggactgcgacgtggcagtgtaagagatagttgaattatctgggaaggtaagccagagagggtgagagccccgtaagcgaaatctcaagcacgcctagcagaatcctgagtaggccgggacacgaggaatcccggttgaaaccgcgaggaccatctcgcaaggctaaatactagttagtgaccgatagtgaaccagtaccgtgagggaaaggtgaaaagaaccccggaaggggagtgaaaaagaacctgaaaccgtgtgtctacaagtagtcaaagcacattaaagtgcaatggcgtgccttttgtagaatgaaccggcgagttacgttatctagcgaggttaagtcagaaaagacggagccggagcgaaagcgagtcttaatagggcgaaaagttaggtgacgtagacccgaaaccaagtgacctacccatgaccaggctgaaggtgtggtaaaacgcactggagggccgaacccacgtaagttaaaaattgcggggatgagttgtgggtagcggtgaaattccaaacgaacttggagatagctggttctctccgaaatagctttagggctagcctcgtggagaggataatggaggtagagctctgtttggactaggggcccgtcaggggttactgaatccagataaactacgaattccagatatccatacacgggagtcagactgcgagtgataagatccgtagtcgaaagggaaacagcccagatcaccagttaaggtccccaaatctatgctaagtggaaaaggatgtggagttgcgtagacaactaggacgttggctcagaagcagccatcattcaaagagtgcgtaatagctcactagtcgagtggcgctgcgccgaaaatttaccggggctaagcatagtaccgaaactgtggatgtgttttaaagagcacgtggtaggagagcgttctaagagcggagaagttgaatcgagaggatcaatggagcgcttagaagtgagaatgccggtatgagtagcgaaagataggtgagaatcctatccgccgaaagactaaggtttcctggggcaggctcgtccgcccagggtaagtcgggacctaaggcaaggccgagaggcgtagtcgatggataacaggtagagattcctgtactgtgtcaaatcgttaagagcgaaggagggacgcaggaggtgaagcacgcatcgcgatggaacgatgttcaagcaacaagtgcggttaagagtcaaatgcttctaaccagcaacacgagttgtgaagaggagtgaattaaaagtagcgaaggtgtggtaatcacactgccaagaaaagcttctagccagagatgacatacccgtaccgcaaaccgacacaggtagtcgagtggagaacactaaggtgagcgagagaactctcgttaaggaactcggcaaaatgaccccgtaacttcggaagaaggggtgctagccaagagattggttagccgcagtgaataggcccaaacaactgtttatcaaaaacacaggtctctgcaaaatcgtaagatgacgtatagaggctgacacctgcccggtgctggaaggttaagaggagagcttagcgtaagcgaaggtttgaattgaagccccagtaaacggcggccgtaactataacggtcctaaggtagcgaaattccttgtcgggtaagttccgacctgcacgaaaggtgtaatgatttgggcactgtctcaacgagagactcggtgaaattataatacccgtgaagatgcgggttacccgcgacaggacggaaagaccccatggagcttcactgtagcttgatattgagtatcttttaaacatgtacaggataggtaggagccagagaagataggacgctagtcttattggaggcaatgttgggatactacccttgtttgaaggatgctctaacctcgacctgtaagccaggccagggacagtgtcaggtgggcagtttgactggggcggtcgcctcctaaagtgtaacggaggcgctcaaaggttccctcagaatggttggaaatcattcgcagagtgtaaaggtataagggagcttgactgcgagagagacaactcgagcaggtaggaaactaggacttagtgatctggtggtaccgtatggaagggccatcactcaacggataaaagctaccctggggataacaggcttatctcccccaagagttcacatcgacggggaggtttggcacctcgatgtcggctcgtcgcatcctggggctgaagtcggtcccaagggttgggctgttcgcccattaaagcggcacgcgagctgggttcagaacgtcgtgagacagttcggtccctatccgtcgtgggcgtaggaaatttgagaggagctgtccttagtacgagaggaccgggatggacgcaccgctggtgtaccagttgttccgccaggagcatcgctgggtagctatgtgcggaagggataagcgctgaaagcatctaagtgcgaagcccccctcaagatgagatttcctttgcgtaagcagtaagacacctcagagacgatgaggtagataggctgggagtggaagtcctgtgaaggatggagcggaccagtactaatcagtcgaggacttgaccaaagcgaagcaaactggaaggttttttgcgagaaggattatgtttagttttgagtgtaaaagctcaaaagagtacggtggcgaaagcaagaaggatacacctgttcccatgccgaacacagaagttaagcttcttaacgccgaaagtagttggtgggcaactgcctgcgaggaaaggaagctgccgtgctcttttttaatattccggcttagctcagttggtagagcgcttgactgttaatcaagatgtcgtcagttcgagtctgacagccggagtaaaggggagaaggaagcggaagacttcctttttttgtgccttttgggtatgttaaaaggctaattaggctaagcaagcatgacttgagggtcaaatttaatataatcattaatagaagacatagtaaaattcctaacaagcttaattgaattgattacggaggctatgctctctttttaagtgcataaaaatcttatagatagattattataaatacgcgtggtgctagttaaatcgttctaggcaatatgccatattataagctaaaatggctatttctagccgctgctgaaaaccagctaagcaaagaaaagtcgctctcaattgttcttctaattgccatcagttgatgatcgttatgctttttagcgcctttcatgtttcttcgatatggtgtccaaaggacatagcccataccttttaactcggcagttaagtcttttcctaagtagccttcatcgcctaaaagataatggttaattggatgagcattaatcatcaattctgtcgtttctttggcatcatgcactgatgctttagttcaagtacatagccatcatcgcttactagcgcgtgaaccttgaagccgtaataatagatttttttagtggctttctagccgatatcagctatgccacgaaagatcttgacgcgatagttgcggataggctgacaaactgggaaactgtcaataattaagaattctccagctgtttttacttcttgattccaatcttgacggatacagcgcattaaaggcaaaagcattcgtgcccgacgattaaagcgagaatgagacaaaccgacaaagaatttacaaaatcttctttgagattcgataccaatttcagtttgccaaataagcatcgctaagatggagctgtcagaaattttaacctgatcaacatttttacggtgcttcaattcatcaggagcacaaagcttgtacaaagaacgacaaattacatttaaccgagcaactaagtgtataattttttacggtaagttgaataaataattaaaaaagcccaagtcctttgaatttggacttgagctcaaacaaaaagaccagtagtctgatgttaagaacaaaaaacacattagaagctggtcttttatgaattcaattgtaactgaaatcgcaaatattataaagtctgaagataattatattaagcgtgaaagaaaaataatctgtttcttcttaaacctgattaaggaaatcatggccttggctttagctaaagttgatgatgaaatgattaccaaggttaaagcacagggctatcagattgataagaagaatgagcgctcaatcaatatggcttttggcgaagttaggtatgtcagaagaagatatgtctgcccaggcaaacaagcaaggtatcccttggatgaattaatgggctttgacaaatacaagcgctacagtattttagcagtcaaaaacatcttagaagtaagcagcgttgccacttatcgcaatactgctctagcagtcaattgcctgtctggctttaatattagccatatgcaggtgggcaatttggtaaaaatggccgggaaaaatattaaagcgggccaagaagcagattcaagatatgatgccgcaggcactaagaaaaaggtcccagttttgtatcttgaaggcgatggcgtggtgatcaaaggcactaaaagccggttggaatttcatcgctatcaggtctgtgaaggcattgtcaatataagcaagaaacgcagaaagcgaatcaatgccaaggaatttgtttctttaagccgacttgatgcgctgaacgaagccaaggagtacctggccaatacttatgatctttctgatactgtaattcttagcaacgccgatggcggtgctggatatgccaaaacagacttcgatgacattgtagggctatgcaagcgtcatgagcatttcttggatgtctttcacctaaataagaaaatcaaagaaaggctatattttgcgcctgacctgcaaggcaagctgatttctgctttggaatacaaatacagctatgacaaagttaaaactatcctaaccactgcagaaagccgactaattgatgaattgaataccgagctcaatcatgattatctggggcgcctaaggaattatattgatcgtcattgggacgatattaagccgtttaagaaacgaaaactgactgtgactaaagccattggctgctgcgagagcaaccaccgcaagtatacctaccgtgttaaggggcaaggcaagaaatggtcaaaatctggagcagaaggcatgcttaggatcttaagctgcatcaagaatcgagagctggaattttggcttagcagcgagtttgaagattcagaaataactgtattgactgaacaggaattaaaagcagcggcccgtgacagcttaaagaagcgtcatgaagttcatttaggcatccagcatggcgcattaaccgcacaggtagctggcaatagttatttaagcaagctaagcagaaatttaagtcatataaatatttaagaaattaaggttagactaatggtttaaaggctaccgcaaaaacattgacacttacaccgagcaaagctaacttgtaaatggtgagaaaaacgattaagcttgagatagttcaattagatcggactcttttctatttaatttaagttacaacttgagtctaatccgattggacttttttattaactagcaccacgcgtttataaatattcaacgacagtaaaattaggtaagcaatctatatctaggaatctgttggggttctgattgtagtaggctaattatacaaaaatgagttaacaaaattctgatcagaattagtacggttaagattgaaaaaatagctggtaattattactgtatctctttgtaattaggtagcaatgctattttttacttctaaaatataattaaaccggtcagacaattcgtattgatctgaatttggataaacagttataacaaaaatatgtgtgcaaagcagatgacagggacttttaattgatctcgtatgttggagcgcgctgtgttgactatttgttctaagtgaacagatgataagtatgcctctatctaagtaccaagatctaggaaattcattctgaagtagttaatatgtgtcaatatgtcgcacaaaggtaactatgaattacagcaacataagagaaatttgaaaaatagtttttaaattgtggcttgttattagtgaaaatgataaattaaatattattttggcagaaaatacagcttaataacaaaaaataaaaatattttttgcttacctttaaaaatatagttcgagatttataaagtttttaacgagttaaagtgatatttctataattgaaagcagattctactaatgtaattactataatcagaataaatatttcataaaaatacatagaacccgaacgaagagcaagacttgccaaagcggagaaaataaggtaaattaataaagtcgcttcgagagatgcgacgagagcttaaaaacagacatgtaaggaaagaaaacaaataaaaagaaaaaaagtacttgcaaagaagtaaataagctggtaatatatttaaatgtcgtcaggtgaaagcagaaaaagcttgagcaagacgaaaaaaacaaatcaaaaaagttcttgacaaagaaatgatggtttgataaaatataaaagctgtctgctttgcaaaaaagcaagacagaggtagtactttgaaaactgaacaaagtttcgctaaaagcgtgcgggtgtaaaaacccaaacaagaagcgaagtcaattcgcaagcaataaatttgagacaaagatcttaaataaggaatgagcaatcattcaaactttttaaaatgagagtttgatcctggctcaggacgaacgctggcggcgtgcctaatacatgcaagtcgagcgagcggaactaacagatttacttcggtaatgacgttaggaaagcgagcggcggatgggtgagtaacacgtggggaacctgccccatagtctgggataccacttggaaacaggtgctaataccggataagaaagcagatcgcatgatcagcttttaaaaggcggcgtaagctgtcgctatgggatggccccgcggtgcattagctagttggtaaggtaaaggcttaccaaggcgatgatgcatagccgagttgagagactgatcggccacattgggactgagacacggcccaaactcctacgggaggcagcagtagggaatcttccacaatggacgcaagtctgatggagcaacgccgcgtgagtgaagaaggttttcggatcgtaaagctctgttgttggtgaagaaggatagaggtagtaactggcctttatttgacggtaatcaaccagaaagtcacggctaactacgtgccagcagccgcggtaatacgtaggtggcaagcgttgtccggatttattgggcgtaaagcgagcgcaggcggaagaataagtctgatgtgaaagccctcggcttaaccgaggaactgcatcggaaactgtttttcttgagtgcagaagaggagagtggaactccatgtgtagcggtggaatgcgtagatatatggaagaacaccagtggcgaaggcggctctctggtctgcaactgacgctgaggctcgaaagcatgggtagcgaacaggattagataccctggtagtccatgccgtaaacgatgagtgctaagtgttgggaggtttccgcctctcagtgctgcagctaacgcattaagcactccgcctggggagtacgaccgcaaggttgaaactcaaaggaattgacgggggcccgcacaagcggtggagcatgtggtttaattcgaagcaacgcgaagaaccttaccaggtcttgacatctagtgccatttgtagagatacaaagttcccttcggggacgctaagacaggtggtgcatggctgtcgtcagctcgtgtcgtgagatgttgggttaagtcccgcaacgagcgcaacccttgttattagttgccagcattaagttgggcactctaatgagactgccggtgacaaaccggaggaaggtggggatgacgtcaagtcatcatgccccttatgacctgggctacacacgtgctacaatgggcagtacaacgagaagcgagcctgcgaaggcaagcgaatctctgaaagctgttctcagttcggactgcagtctgcaactcgactgcacgaagctggaatcgctagtaatcgcggatcagcacgccgcggtgaatacgttcccgggccttgtacacaccgcccgtcacaccatgggagtctgcaatgcccaaagccggtggcctaaccttcgggaaggagccgtctaaggcagggcagatgactggggtgaagtcgtaacaaggtagccgtaggagaacctgcggctggatcacctcctttctaaggaagcgaaggatatggagagcaggaatgctaagagaagtatccagagcaagcggaagcacactgagaaactttgtttagttttgagggtagtacctcaaagatttgaaaaacgccaagcgttagtcgggcctatagctcagctggtttagagcgcacgcctgataagcgtgaggtcgatggttcaagtccatttaggcccattgacataacgaagaaaaagagttaaagttatgtctggccgaaaataaaatactctgggggcttagctcagttgggagagcacctgctttgcacgcaggaggtcatcggttcgaacccgttagcctccattgatccagaaaaaggatcaaagagctagtacattgaaaactgaatataatccaagcaaaaaaccgagacaatcaaagagaacagattgtagagcgaccgagaagagaattcttgagtaaggtcaagtagaaaagggcgcacggtgaatgcctaggcactaacagccgaagaaggacgtgacgaactacgaaaagcttcggggagcggtaagtacgcagtgatccggagatatccgaatgggggaacccaatgcagagatgcattattgattagtgaatagatagctaatcaaaggaagacgcagtgaactgaaacatctaagtagctgcaggaagagaaagaaagatcgatttccttagtagcggcgagcgaagaggaaagagcccaaaccaagtgatttatcatttggggttgtaggactgcgacgtggcagtgtaagagatagttgaattatctgggaaggtaagccagagagggtgagagccccgtaagcgaaatctcaagcacgcctagcagaatcctgagtaggccgggacacgaggaatcccggttgaaaccgcgaggaccatctcgcaaggctaaatactagttagtgaccgatagtgaaccagtaccgtgagggaaaggtgaaaagaaccccggaaggggagtgaaaaagaacctgaaaccgtgtgtctacaagtagtcaaagcacattaaagtgcaatggcgtgccttttgtagaatgaaccggcgagttacgttatctagcgaggttaagtcagaaaagacggagccggagcgaaagcgagtcttaatagggcgaaaagttaggtgacgtagacccgaaaccaagtgacctacccatgaccaggctgaaggtgtggtaaaacgcactggagggccgaacccacgtaagttaaaaattgcggggatgagttgtgggtagcggtgaaattccaaacgaacttggagatagctggttctctccgaaatagctttagggctagcctcgtggagaggataatggaggtagagctctgtttggactaggggcccgtcaggggttactgaatccagataaactacgaattccagatatccatacacgggagtcagactgcgagtgataagatccgtagtcgaaagggaaacagcccagatcaccagttaaggtccccaaatctatgctaagtggaaaaggatgtggagttgcgtagacaactaggacgttggctcagaagcagccatcattcaaagagtgcgtaatagctcactagtcgagtggcgctgcgccgaaaatttaccggggctaagcatagtaccgaaactgtggatgtgttttaaagagcacgtggtaggagagcgttctaagagcggagaagttgaatcgagaggatcaatggagcgcttagaagtgagaatgccggtatgagtagcgaaagataggtgagaatcctatccgccgaaagactaaggtttcctggggcaggctcgtccgcccagggtaagtcgggacctaaggcaaggccgagaggcgtagtcgatggataacaggtagagattcctgtactgtgtcaaatcgttaagagcgaaggagggacgcaggaggtgaagcacgcatcgcgatggaacgatgttcaagcaacaagtgcggttaagagtcaaatgcttctaaccagcaacacgagttgtgaagaggagtgaattaaaagtagcgaaggtgtggtaatcacactgccaagaaaagcttctagccagagatgacatacccgtaccgcaaaccgacacaggtagtcgagtggagaacactaaggtgagcgagagaactctcgttaaggaactcggcaaaatgaccccgtaacttcggaagaaggggtgctagccaagagattggttagccgcagtgaataggcccaaacaactgtttatcaaaaacacaggtctctgcaaaatcgtaagatgacgtatagaggctgacacctgcccggtgctggaaggttaagaggagagcttagcgtaagcgaaggtttgaattgaagccccagtaaacggcggccgtaactataacggtcctaaggtagcgaaattccttgtcgggtaagttccgacctgcacgaaaggtgtaatgatttgggcactgtctcaacgagagactcggtgaaattataatacccgtgaagatgcgggttacccgcgacaggacggaaagaccccatggagcttcactgtagcttgatattgagtatcttttaaacatgtacaggataggtaggagccagagaagataggacgctagtcttattggaggcaatgttgggatactacccttgtttgaaggatgctctaacctcgacctgtaagccaggccagggacagtgtcaggtgggcagtttgactggggcggtcgcctcctaaagtgtaacggaggcgctcaaaggttccctcagaatggttggaaatcattcgcagagtgtaaaggtataagggagcttgactgcgagagagacaactcgagcaggtaggaaactaggacttagtgatctggtggtaccgtatggaagggccatcactcaacggataaaagctaccctggggataacaggcttatctcccccaagagttcacatcgacggggaggtttggcacctcgatgtcggctcgtcgcatcctggggctgaagtcggtcccaagggttgggctgttcgcccattaaagcggcacgcgagctgggttcagaacgtcgtgagacagttcggtccctatccgtcgtgggcgtaggaaatttgagaggagctgtccttagtacgagaggaccgggatggacgcaccgctggtgtaccagttgttccgccaggagcatcgctgggtagctatgtgcggaagggataagcgctgaaagcatctaagtgcgaagcccccctcaagatgagatttcctttgcgtaagcagtaagacacctcagagacgatgaggtagataggctgggagtggaagtcctgtgaaggatggagcggaccagtactaatcagtcgaggacttgaccaaagcgaagcaaactggaaggttttttgcgagaaggattatgtttagttttgagtgtaaaagctcaaaagagtacggtggcgaaagcaagaaggatacacctgttcccatgccgaacacagaagttaagcttcttaacgccgaaagtagttggtgggcaactgcctgcgaggaaaggaagctgccgtgctcttttttaatattccggcttagctcagttggtagagcgcttgactgttaatcaagatgtcgtcagttcgagtctgacagccggagctagcggaatatgaaagaggcgggggccagaggcttccgcctttttgtgtgctattaaagttctataattaagcttttctaagtcttgaaatttttttaaatagggtttccaaggaactttgaggagtttgtactctgaatggtattgatggatacgttattttttctgccggaaagccacagaatggacaagtgggctgctttaaaagggcttcgtagactttgtattgcactccattgaagaatttatagaaattgttgtaaaaaacgatatttttatctttaatatcgagatcaaatttaatacaatcattaacagaggacatagcacaactcctaaatagcttaattgagacagaatatcataaatattcatcaacaggaaaaattatagagctaataaagaagttatagctttttatttgcgttatgaaatgtataaacttgttgtctttgtctctctattagactggtaaatattcaaaagtatatgttaaatttcagacattaaatacttagaaaaaaggacatatttagatggataaaaattctgatagacttacgttagtgccatatttcccgaatgaaaagcagactcttaaatggtaccaggatcctaaaatctgtaagcaggtagataatattgataccgtttatgatttaactaaattacgtcgaatgtatgaatatttgtcagtgcatgggtggtgctactatattcaatatcaagggaaattgattggtgattgtactttgctaaaagacggtgagatatcaatcgtgatttgcaaagaatatcaaaacttgcatcttggtagaaaatgtgtcgacaaattggtgcagcttgcaagaattcagaaaatgacgcaagtgaaggctcacatatatgactttaatattcaaagcaaaaaaatgtttacaagaatggggtttaaagagcaacaacctgactggtactcttatgatttatagatcaaaaatattcatgttaccaagtaattcatacaaacaatcagttggtgtgatgtcagataagcactcgtattagaaaaatgtaatcatcagtaattaaagactgtagttgaatcaaataattaactcagcgtataaaatgctgagttagacaaaaaaataacgagcaattctctcgttgttttatggattcattttgatcaaatttttagtttatctttagttgtaaataccaacttgattaatgtgggccaattccagaactggagattgagcgaggtccaaactaacatcacagccagcatggataccattattttcgccattaagccagtgggtattattagttacgtaatagacagtaccattaaatgcaatataagctggacgtccatttttaccattgtaatttgatagagtttctttagtaaattttctcatataagaagctcctttctaataagatcttgatatattaatggtaacactgtgtcaccttatagcaagagatacgaaggagtcttatgcttttcttatgaaagatgaccacgccacccagcaatatcccaatctagaaagtcataattaagctttttaccataaattttctcgtaggcagcaactttttgtcggtagtcgagttccatcatcttatgagcgttttcgttggcgtttagagaaacgtcagggaagattggtggtaaaacatggacaatatatttggtctcataaaaattaggatctttcttttcgattttaggtagatccttaatctcgacaaaagtggagattaccggtacattttgtttagccgcaaaataataggcaccacgttgtaatttgcgaggcttgcgataattccaccacatctcctgttctggataaattaaaacccaattatttttagctaaaactgcactgaggtgcttaggaaattcatttccaatatagctaggactctgaactagtggaatagtgccaacataattcattaaatagcggaaaaatcccggtagcattaggttagtatcttcaattacaattgaaagttgatggtgcatcttgttagcgagcagcttcattggtaaagaatcaacctgattgtagtggttagaagttaaaattgcgccaccaataggtaaattatttaggttctctaaacctacaaattcagttgatccagctaatgctctggataaagtaccaaataagagatgtccaatacgattattaagcttacttgaaaaagtgttacgcttattccaataatcattgaccaatttaaggcgctgatctagggacatttggggatcgccgatttctacttttgctgtgaagttgcgttcattagcagctttttttatatttttaatcactgcctcacgattatcgccaaaaatcatagtgttactgcctctcgtttcttaacttttgcccaattattaggatcttgctcagttttgtcttccttagcaagcatatgatccaatttttcgcggtctgctgcacgctcgtcatcagtataattattgagttcgttctttaattcatcgaaaaactgcgtttgtttggcactatcccagaagtactgtgcatattggacattagcaaaatgccatggcttaaagaaaagattatagtgaatcagaccaggattagttaaaggttcagtgttttcatttggcatagcatcccagcgaggatttaagtgcaaaattctaccttccccgatttcatttaaatagtcttgatcaggagcaatacaatcaaaatgatacttttctaaaagtgtcataaaatggtcaataaaatgttcagcgcgaaaggccctagcattcatgacgagcatgccagagttaatgtatttcttggggtcaagtgccaggacatttttgatgtattttatcatcttgtctacatattgaattgaggagtcggtgcaagcagcaaataaattatcacccaattcggagttgtatagtttagcaagatcgtcgtttacaattgtgtcgctatcaatatagatcaccttatcatattcgggaaaaagttctggaataaagaggcgataaaaaatcgacatggtaaaaaagtcagcgcgaagaaagttttccttacgattttgaataggttgtacaagttgattatcaatatggaaaaacttcacatgaacgtttgaactgctaagattagacaaagctttttgatgctttgatgagagatcttgatttaaaaagtaaacagtataatccttatttggatctgtatgtttgactaaagaattaagagaaacagcagcgtatttggtaaagtcatcgctgatactgtaaaaaataggaattgtcataaaattacctttcttagattttaactgattccgtttgtttaaccttagcccaagtatttggctctttgacaatcatgtcaacttttttagccatccattctaggtcagctcgtgccttttgacggtcttcatcagtaaagttgtctaattgctgctttagttcatcgtaatacggcgtagttttagcaacataccagaaataatgaccatattgaacatcagcaaaatgccatggtttgaagaaaagattgtagtgcacgatcttaggatcttgaatttcaggaatgctttcatttggcatagcatcccattctttaggtaggtgataaatcttatcttcgcaaatttcattcatgtaggcttgatcagggtcaacgttatcgaaatgatatttattcattaagtaatagaatttatcaacaaactttttttctctaaaggccttcatattaaacagaattacaccattattgatgtatttttctgcaggaaaaattccctgacattctttaatgtacttttgtaaaagtggcatgtaacgaattgataagtcgggacatgaagcaaacatgttgtcggcgatatcaatttcatacattttagcaatatcagtacagataatagtatctgcatcaagataaactgccttgtcatattgagggaacaattctggaatgaatagtcggtaaaaaattgacatagtaaagaattgagcacgcaagtagttttccttagtattgtgaattggcttaaccatgtcatcgtcaatatgaaagatttgaacatgaatattatcagttgaaagatcttctaagctctttttgtgctcatcagatatctgttggactaaaagggtaatcgtatagtccttcttggggtcagtatggtcaattaatgatttaattgaaacatatgcatatggcgtataattatcgctaattgtgtaaaaaacaggaatggttttcaaaataagatcctcctaaattatttttttaaattatttcgtaatttgagatattcgttaagcaaatcatcatattcatgtaaatgaagtacactgtgtacgcgatcaacatcccatggcttaactgtttgagtatggaaataaggccaaaacctaaagctagtagtgaaatgttgaattttggtgtttttttgcaaatgatattgctcattataacggcgtggtgctactcgcttggctacagctagcttgtttattgctgattggtcgggcaaaaacatttgcttaacctgcatcatatgccgcacctcggcaaagagatcagtttgcttaattttcttcatattcagcaacaaaacgccagaattaagataatcaaatgcgcgcttggtcttaagattgtggaagaagaagcggccccaataatcaagtacgcccactaattcgattccggtaatatcctcattgtaaaaagttgtaatatcaccgcgaatgacaatgtcatcgtctaaataaagaatgcgatcaggaatctgtggcaattggtctgcaaataaacgcaacatagcatatggcgtgaagcgagtattcatgttagcggttggcggttcctgttcaaataacttggtgcagtcaattaattcaactgtactgttaggattggctttttttactaaagaacgtaaaaaatcagccgcatgttgtgagaaagggtgatatttacgttcatcactgtgtgcctccatcgttaaaatataaagatgcaattcttgagcaccagaatttttgattaaagataaggtggaaatcaaaacgccatcttgagcattttcatctccacaaaaaagaatattcatgataaactcctattttttatttcttttgaatatattgacaatattcataatcgctattttttgcacgctgcttcattacctgccaaatttcatcgtgaagcttattttgagcttccttacggcttaaatttgtatccgggtaaaagggcccatcaatgtaaataacggcactaggccgcttgctaagccactttttatggtaggttttggtcatgacgaaactaggcgcatttaatttaactggaaagtgcatgcttgttgcatcgaacgggcgaatcttcgtgtaatagggccagacatgagcttcagggtagatgagaatctcgccctttttatccttaatcacagtttgaatggctttaattagtttgagcgattgcttcatatttttgccaacaggcagaccgccgtagcgtacaagatatttgccaatgaaggggatgccccagttagcttgattagcaatagcataaaaatttttgattggaaaaattgtgagcgaggtaaagacatcccccatgggtctagtatggttgccataaataaaatagcccccattgacttgcttaagtttttcttaaccaacgacttttacatgatcgaagaagcggaaaaccacccaaccaaaagtgcatgctaagtgacgagcggtagtggaccagattctagctccaagagaattaggtagaataacgtaattatcgggtagactgaaattttgatcgtgactatcgactacatcatcggttgttttttggtaataataaatccgtttcatcttgccctccatgatacttatgtatcctatgataccatggaaaaaagcctaattcctaagacgagaggaatgctgaaagaaaataaaaaagattcgtaatttcatgatcgaaaaatacgaatcctctgtaaaatagcataaaaaaagcaccgccttcttgcagtgcatctttcatattatgggtggccaggggatcgaaccctggacccacggattaagagtccgttgctctgccagctgagctagccacccatatttgttcatcagctcccgccgacatttaaatatattaccagtagttttataatttgacaagctttttttgaaaaaagttgaaaaataatttgaagctagcaaaaagcgcccataatggccgcttttttactaaagtttatcttgaatatgataggctgtgccttgctgatcctgcttcatgtgatctgcatagtaaacagcatagacaccgctttgatcatttttggcaatcacaatttggcgccctgttggacgttctgccttaatgatttgagcactgcggcgtgcttctttaaagtcgtgtgaagatgcgatggcatcccctggattaaaaaatacagcttcgttcattgtaaagccccctcgtacaaattctaattttattttaccaagaaagccctttctaaatccaatttaagaaacaaaaaagagataagatcaacatcttatctcttgcgaaaaatattatgggtggccaggggatcgaaccctggacccacggattaagagtccgttgctctgccagctgagctagccacccatgtcgttgaatcaatcaacagatattattatgctattgttgataagaaaatgcaagctttttttgaaaaaaaacaaaaatttttggctaatgttacaaaattcagtataatgtaagggcaaaggaggcattcccgatgccaaagaagattctcgtcgtcgacgatgaaaagccgatttctgatattatcaaatttaatttaactaaggaaggctttgatgtcgacaccgcctatgatggcgaagaagctgttaaaaaagttgacgaatacgacccggatctaatgattctggatttgatgttgcccaaaaaagatgggttggaagttgcgcgtgaagttcgtcaaacgcatgacatgccaatcatcatggtaactgctaaagatactgaaattgataaagtcttaggactggaaatgggtgcagatgactacgtaaccaagccgttttctaaccgggaattagttgcccgtgtgaaggctaacctgcgtcgtcgtgatattgttaaaaaagcagaagctgccagccaagaagagaccgataagaatattaagatcggtaacttggtcattatgccagatgcctatattgtagaaaaaaatggtaagaagattgaacttactcaccgtgaatttgaacttctttactatttagctcaacatatgggacaagttatgactcgtgaacacctgcttcagactgtttggggttatgactacttcggtgatgtgcggactgtagacgtaacggtgcaccgtttaagagaaaagattgaagataatccaatccaacctcaaattttagttacccgtcgtggtgttggctattatgtaaaacagccgagtgaagaataataaagaaagccacagaactgttatggtagtggctttcttttttatattttttagatattgaatgagtagaatgaaaaaattcaaagcaagattaaatagtacatttaattccattaatactaaaattgcaattgtgttcatgctgatgctactggcaacaattgaagttattggagcttattttacccgtcaattagagcaaaatagcattgaaaatttccaatcatcaatccagattcagactatcgtcagcaatcagttagctaatcagttgaccagtgataataaaaatactaatgatcgcttgaatcaaattgttaatgactacaataatgatgcaattagtgaaattattgttgtcgataataaggatacgattcgtgccgtttctaacttaaatgataaaagtaagatcggtcaacggattaacaatactgatgtgaagcaggttatttcaactggacatcaaattaataaagtggtcgatgatcatggcaattacatgattcaaatatcgccgttgactagtggcaatggctctaacaatactgttggtgctgtctatgttaaagctagtatgcaagatgtctttaacaatttgcgccaaatttcattgactttcttgattgcgtcattgatcgcggctttattaggtgcatttttgtcattggttatttcccgggcaattacgcaaccgatcgaagaaatgcagaaacaagcattgcatattgctgatggtgattattcaagtcaggtaaaaatttattccaatgatgaactagggcaattagctaaagcatttaataccctgtccgtacgaattgaacgctcacaagaagagtctgatagtgaacggcggcgactagatagtgttctgtcacacatgagcgatggagttctagccactgatcgtcatggtaacgtcagtgtggttaatcatatggcactaaactttttaaataaaaaagaagacgaggttatcaataagccgattgctgaagtactgggactagaagatacttcgtcacaagatttgatttctagtcaaaaagagatcgttattacccttgatccaggtacgcgggatgaaattattttgcatgctagtttttctttgattaagcgggtaactggctttgtatcagggtcagtttgtgtattacacgatgtaactgagcaacaaaagaatgaagattcacaaagacagtttgtttctaatgtctcacacgaattgagaacacctttaacaagtttgcaggcttatattgaagctcttaatgagggtgcttggaagaatccagagattgctcctaagtttttggaagttacccaacaagaaactagtcggatgattagaatgatcaatgacttgttgagtttgtctagaatggaccgtggcgtttcaaaaatggatctagaatttgttaacttaaacgattttgttaaccatattcttaaccgtttcgatatgattgttaaaacagataaaaataaagaaaagaagaaatacacaattaagcgtgaattaggcagtcaagccttatgggtggaaatcgataccgataagatgatgcaggtaattgataacattatgaacaatgcaattaagtattcacctgatggcggtgtaattactgttagaatgacccaaaaccaaaatcatgttatcttaagtatttctgaccagggcttgggtattccaagaaaagatctgggtaaaatctttgaccgcttttaccgagttgataaggcacgttcccgggcccaaggtggtaccggcttgggcttggccattgctaaagaaattgtggaagctcaccatggtaaaatttgggctgacagtagcgaaggcaaggggtctactttctatatttccttgccatatgaaccgatgacagaggaggatgattgggatgaagtttaaattcaaattcggtgaatttttcttaggcttagctacactgatcgtcattgtcctctcaattgtgctttggatctttattatgactagtgatcagcgctttagtaatattggtcagcaaaatcaaaataatatcactaaagagcaaacgcgtagtcacaattttaagtcattatatgatttatatattccaactacttcatatggttttgctaatggaaatttgtgtcagctatatgattcaaaaaataatttgactttagaatttaccaaagagataaaaaaagccaaggccactaataaaattaagaaaatagttgatactagaactaaatatgaagagtatttaaacaatcccaactatgtgcagttggtttatccagatgaaattactttctccttatttaaccagttgaataatgccgcaaatgataaccgcgagtttaaccgcttctttatctcgcagtcaaatcactggatttatttgggaaatgatcagactaatgaaatttatcaagtaaaaattgctggcgcaaattttgataaactacgtaaatatgcacgtaatgctaagagcaagtatccagttagattagttcgtttaaaggaaggctattcaccgttttacatcaagacaatgaatgctaaagtttatagttacttgactaatcatcaatcgtattcttactttgtttcgcgtttattaggtacatctggcgttactagtaagactaataagaatggtcaaacggtatattctttgaactactatactcgcttaagagtgccagattctaattcaggtgagcataattatctttatactcattatgaaaaaaataagatccccaatactactaaccgcttattagatagcgtttattatgttcaccaattgggtttaaccgagcaagatttacgcttctttgatgcagatggtgctaatgttagttatctaaactatattgaaggtattcctgttttcttaaataagcatgatttgcaagtcaagacgaccttttcaacagattcgattaatgtggcctttaatagtgtaaacttccaaattccaattccgtttgatggtcaaactaagcggttaaaaccaacccaagatgttgttgatgaattagtcaatcacggcctaaagcaggaagatattcaacgaattatcgttggttttgctgaagaaaaggattcaagtcaccatagtttgattaacttgatcccaacgtactatatcaaagcctacgatgaatggaagagcctaggtgaatgggaaaagcaagacgtatctacctaccgtgaagctgatcagttaactgttaacgaagggggaaaatagaaatggaccataaacgaatcgaatggctatttttcgttgttttctttttaattgatatttatcttggaatcgaaattctccgttctcccgttaatttaagtaacgctgataccactactcgtagcgttgctagcatccgcaatgaaatgaagtcagacaatattgatttgcccgataagatttcggatgcaccagattctggttattatttagctaccaagaatcgtgactatctctctggcaaagttagctcgctgactaatgtaaatgcccgctattctaaaagcgataatgtgctttatggtgaaccaagacaagcagtccttttgagtaaaaaacctaaggaagctttagaacaaattgaagattttaagaatgattcgaaaaatattccttatggtaaagaattcaagtatgaacctgatatgtcgagtgaagacaattatgtttttgtgcaaaactcagattatggtgaaatttatgctaactcggcccaattgaatatcaatgtaaaagataatcagattattaattttactgaaacatatatggggcaagctagtccagtgcgtgaattacagtcaaccatcagtgcttggcgtgctgtgcgtgcgatgtacactgatcgtgagttgactaataattcgcgcgtaacgcaggtaaaattaggttactccaaactgacagaagtacgtggcagcacaatcttgttgccaacttggctggtttgggtagaaaataagacaactaaaaatatcacgatgaaacgtattaatgcatatacggcacagatgctacaatcgagtacctataatgtagaaaagtagaagggacaaaaattgaaggtttccgttttagcaagcggctcgaccggcaataccagtttaatcgttacaggccagcataaaatcctgatggatgctggcatttctggtaagaaaactaaagatttgctagccgaagttggagttgatattaacgagattgatatggcctttttaagtcatgatcataccgatcatagtggcggactcggcgtgttgatgcgccgttatcctaagatagatgcttttgccaatagtgggacttggcagtatttattggatacgaaaaaaataggtaaattaccggctgaacaaatgaatacaattgaaccaggcaaaactaaaacttttggtgatgttgatattactgcctttgcaactagtcatgacgcagctgagccgcaatattatgtgtttactagtggtggtaagcgggtcgcttttttaactgatacaggttatgtatcagaagaagttgaagggacaattgaagatgctgatgcctatatgatggaatttaattatgataatatgatgctcagagatggaccatattcctgggcactgaagcagcgaattttgtcggatgtaggccatttatctaatgacgaagcagcccaggcattagttgatgtagtcacacctaaaacaaagcatatctttttagcgcatcgcagccaacataataatacggagtatttagctcacgaaacggcaaaggaaatgctgcttgagggggatgcaaatttggatgatgatgttaagattattgatacagaacctaatcagcctacaaaattagttgaaatttagcagttttcacaacattttttcatataatattcaaatttaatcggtatgattagtaaacaagatgaggggagaagcaagtatggtagaaaatcaaaataataataacaatttacaacaacctagaaaaaagaatactaatggtaaaatcattgccactgcagcgattgtcggtgtagttggtggcttgatcggtggaggcgtttcatattacgcagctgatcaaatgaataatgcatcagttaataatggtgccgctcaaactagtgtatcttcaagtagtagtaaagtttcagaaaagagtgctaagactagtggcacaatgactactgcatataatgatgtaaaaggagcggttgtttcagttattaacttaaaacgccaatcaagttctaatagtactaattcactttataatagtttattcggtaatgatgacagtgatgatagctcttcatcaagcagcaagggcaagcttgagacttacagtgaaggctcaggtgtagtctacatgaaatctaatggcaagggctatatcgttactaacaaccacgttatctcaggcagtgatgctgttcaggtaatgctagctaatggcaagacagtaaatgctaaagttgttggtaaggatagtacaactgacttagctgtgctttcaattgatgctaagtatgtgactaagacggccgaatttggcgattctaagagcttacaagctggtcaaactgtcattgccgttggttcaccattaggtagtgaatatgcttctacggtaacgcaagggattatttcagcaccggctagaaccatttctacttcatcaggcaatcaacaaacggttattcaaactgatgccgcaattaacccaggtaactcaggtggtgccttggttaactcagctggtcaagtgatcgggattaactcaatgaagttagcccaatcaagtgatggtacttctgtcgaaggaatgggctttgcaattccatcaaacgaagtagttacgattgtgaacgaattagttaagaagggtaagattacccgtccacaacttggcgtaagggtaatcgcacttcaaggtattccagaaggctacagaagccgcttgaagataaattctactttgaagagtggtatttacattgcctcagtaaacaagaatagttcagctgctaatgccggaatgaagagcggcgacgttattaccaaggttgacggcaagaagattgatgatgtggcatcgttacacagcattttatacagccataaagtcggtgataccgtaaatgttaccgtgaacagaaatggtaaggatgtcaacttaaaggtaaaacttgagggtaactaaaaatcaaaatagaagttaattaaaagaaaaaaggctatatcacgcggtttaaacgtagatatagcctttttattaactttttaaatgtgtaacatcaaattgttcggaattatttgttgtcaaacagacaccagcctgttgataagtgtggataactctgtggattgtgtataacttgataaatataggtttattaacttgtggaaaaatatgatgattttgaccttatttagtgaattctatttgagaaaacaggcgttcatgcaggtataacaagccttaagagataaagtttgtgaaaaaaggctttcataaaatcgatgtgaataaagaaattttagaaaaattattaaatacaacttctggggtataagtaaaataataccacaaaatgttgaaattggtctttgaagttttgtggaaaagtttgggtaaatagtgtggaagggatgttagtattgtgctggtagattaaaattatgaatggaaaattagctatgcttgttataatagaagcatgaatatcaaaattgtatgtgttggaaaattaaaagagaagtattttagggatgcaattgcggagtatgagaaacgactcagtcgttttgcaaaggtgtccattgtacaggtgcctgatgaaaaagcaccggaaaaattcagtgcagctgaagatgagaaggttaaagagattgaaggtcagcgaatcctgagcaaaattaaagataaggagtacgtgtatgtgactgcaattaaaggaaagcagcgcagcagcgaagagttcgctaaagagattcaggatctcgcaacttatggtcattcagacattacgtttgtcattggtggcagtttagggactagcgatgctgtaaacaagaggggaaatgacttgattagttttggtaaattgacgatgccacaccagttgatgcgcgtggtgttgattgaacaaatctatcgtgcatttatgattaactcaggtagtccttatcataagtagaatatagaaaaagcccataaattgggctttttatttttgcatatttgcagatttcacaagcatattgaaaaaaactgtggcaggtcagtgcttttttagttttttatgatttaaaaatagattttgttaaattatgtttggcaacaaaaaagacgatctttcgatcgccctgataatttttgagctaccagctagtagctcacgcacacgctgaagtgtactttatctttgtagtatctcaattttaacacataaatggtaaaattaaaactgcacgttgaagggggtaagtgtcaatgtttttgcggtagcctttaaaccattagtctaaccttaatttcttaaatatttatatgacttaaatttctgcttagcttgcttaaataactattgccagctacctgtgcggttaatgcgccatgctggatgcctaaatgaacttcatgacgcttctttaagctgtcacgggccgctgcttttaattcctgttcagtcaatacagttatttctgaatcttcaaactcgctgctaagccaaaattccagctctcgattcttgatgcagcttaagatcctaagcatgccttctgctccagattttgaccatttcttgccttgccccttaacacggtaggtatacttgcggtggttgctctcgcagcagccaatggctttagtcacagtcagttttcgtttcttaaacggcttaatatcgtcccaatgacgatcaatataattccttaggcgccccagataatcatgattgagctcggtattcaattcatcaattagtcggctttctgcagtggttaggatagttttaactttgtcatagctgtatttgtattccaaagcagaaatcagcttgccttgcaggtcaggcgcaaaatatagcctttctttgattttcttatttaggtgaaagacatccaagaaatgctcatgacgcttgcatagccctacaatgtcatcgaagtctgttttggcatatccagcaccgccatcggcgttgctaagaattacagtatcagaaagatcataagtattggccaggtactccttggcttcgttcagcgcatcaagtcggcttaaagaaacaaattccttggcattgattcgctttctgcgtttcttgcttatattgacaatgccttcacagacctgatagcgatgaaattccaaccggcttttagtgcctttgatcaccacgccatcgccttcaagatacaaaactgggacctttttcttagtgcctgcggcatcatatcttgaatctgcttcttggcccgctttaatatttttcccggccatttttaccaaattgcccacctgcatatggctaatattaaagccagacaggcaattgactgctagagcagtattgcgataagtggcaacgctgcttacttctaagatgtttttgactgctaaaatactgtagcgcttgtatttgtcaaagcccattaattcatccaagggataccttgcttgtttgcctgggcagacatatcttcttctgacatacctaacttcgccaaaagccatattgattgagcgctcattcttcttatcaatctgatagccctgtgctttaaccttggtaatcatttcatcatcaactttagctaaagccaaggccatgatttccttaatcaggtttaagaagaaacagattatttttctttcacgcttaatataattatcttcagactttataatatttgcgatttcagttacaattgaattcataaaagaccagcttctaatgtgttttttgttcttaacatcagactactggtctttttgtttgagctcaagtccaaattcaaaggacttgggcttttttaattatttattcaacttaccgtaaaaaattatacacttagttgaaggggtagcgcccttactcgtgtggaaggaggtagactcccatgaagtattactttatctttgtagtagtatttctaccactgaatcgtgatggcaagtgcttcaagaagctcaagaaggctattaaaaagttcctcaagaacctgattgatagtttctttgattaatccgatccagactcaatacagccgtccttcggggcggctttttttatgatgaaaatggcaagtcattgggtgaaaagtattacgcatatcgtgcagtaactgtaaatcaaagtcccataacaattaatggcgctaaattctacaagttggctgatagggatgcttatattaaggtgaccaatattagtggtcaaggtcgcgttttaaagcgtaacgcctacatctacagtacatcaaaaaaacgcactacgcataacggtgcttggaagttgtacaaaggctccacagtgacaacttacggtggttcatacaagtttaagaatggcaaacgctattacagaattggcggacctgctaagcaatatgtaagaacatcaaactttaattagaagttgaatatcatttacgacagcaacataatagttgctgtttttttgcctcaaaaaccatagaaaatcttctgtaatcaaggtaaaatgaaattgattttacaaatatcatggaggatgttggaatgagaaaacgatggacagcagctgttattgctgctttagttgccgtaagtactgccgcaactactgttaaggctgacgatactaacacaacagctaatactaatgagacgcaagtaactgcaactagtgaccaaactaattctgattcagataaggttacttataacaaggcagattatttgtctgctaaccctaaattagtgcgaattaagcatgcaactactgcttataaggatgctgcattgactaaatcagcacagagcgtaaaagcaggatcacactttttaattagtcgaattgttaaatctgacaaccaagtaccaatactaaagactagtgatggcttgtatttgcctgctaaaaaatctttggtaactaaggtcatagcctaccaaaatcctaagggttatcatcaagtacattacacacaagttaaaccatacggtaaggtgggttataacttgtaccgtggctatgagggtattaagacttggaaagtaatgcatagagttggtacttgggcaggtacgaattactataaccaagctacttataacgcagtaaagaacttccaacgtagtcaccacttgccagcaactggtaatgttaacttagctacttgggaaaagatgggcttttctaagaagtcatggtatagcattgatagttatgttgccccacttaaggcttatgcttggcaagggcgtaaagctcatattgaagcaatgattaatcaagcttacaaatatatgggaaaaccatggttagcaggttgttcaactagtccaagctacggtgttgattgttctggtttggtaatgcaaggtctttatgcaggtggcattagtccagttccaactagttcaatcggccacgctcatccaggcaatgaatggaattcacgtaatctttgggctgacaagcacctaaagcgtgttccatattcacaaagacaacgtggagacttagtgttctattaccaaccaggtacgcacactatttggcatgtagctatttaccttggcaataaccgagtaattgaaagctggccaccacgtgtgatggttcaaccaattgttaattcacaaagaaatgtaattgctggtattaagcgaccatttatttaaggaaaaatatgaaaaaatatttagctattttattagtcagcctgggctttagttcattattgttaactcgccaaacagtacatgccgctgataatgatgatgccgcgacaactaatcaattggctcctaagtatactggccttaaaaaagttggtaaacattatgtctattttgatcaagcaggcaagcaacgttttaaaaataccaagactaaaaaagcatattattggattaataaaagcggcaagatagttggtattaataactacgccaaggtaattagccaactacctgaaatgccaactggttgtgaaattactgccgtgacaatgatgattaattttgctggtaaaaaggtaactaaacagcaggcggccaagattatgccgcgcagctctaaccctaacaagggctttatcggttcgccttacaagaaatatccgctcggctattgggttgctcctaatggggtgaaaccagtagtgaagcattatctcggtaaagcccagaatatgactaattgtggtttgcccgcaattaaggataagctgattaattcacacttggtggttgtttgggtagggatgtttgacggcctctctaaccatgctattaccttgacgggttaccatggtaaaacgatctattataatgatccttggactggaaccaagcggaaaatcaagcaggaaatttttgcaacgcattgggctttagatgctcatcgggcgttgagttattaattttatgtaaatatatttactttttagtcatgttgatcaagccactttcgcagcatttcaacatattcatctgttttttctacaaaagacatgtgaccgcagttttcaaatagctgccatttactgccagcaagatgatcctgcatcgttttagctacataaggtgtacataaatcatcagtcccactcgtaattagagttgggatttttattttgcctagtttttctgtgtattcgtaatcgtgcaagttgccctctggcgtatattcatttggtcctcaggcggtttcataagctacaataccaccacatttttttcgcataacgcattcaggccacgttttcgtcatgtcaattgcatgttgattcatgaagtgctcattagcttttaagtaatcaggatcgttaaaattgctagtcaattcggcgcgatgaattgccgcctgttcttcaattggcaagtatttaatcatccggtgtaattctttgctccataaggaagcagacgacaaggttgaagacaagatcaagctttgaatgccaacaggatgataatcacacatgtagattagcgctagcatcccaccccaactttgtcctaataaatgtattttgcgcaaagccaagtgctcccgcaacgccatgagttccttaacccatgtttctttagtataaagttcagggtgatcatcagggatgctactcttgccgcagcctaactggtcgtacatgataatccgtcggttatcaatttcggctaatttgtccaaaacctcaaaataattatgacttgagccgggaccaccatgtagcaatacgagtggtgtcttttcgcttcttcgaccaacaatacgatagtaagtttcatagcccatgaaaggcatttttccttcgataatttccattttttcacctatttgaacaaaaacaatgagatattaaccaaaattagcagggtaaagaagattacccaatctctagctggtaaaggaatagcgatgatcgtcgaccttctttgcccttcgacatagccatgtgattccattccttgggccagattgtcagctgaatttaaagcaacaagaattgctttaaaatagaggaccggcgaccaaaaactgagataaatgccccgcatcatagcgctagttcggatctgtttaaccgccatcttcatctgcggaataatgttaatcgccgccagcacgccgtaggcaaatttactgggtaagtgcaggttctgctctaatgatcgggcaaagtctgtagcggtgttattacgtgtcacgcaggcaatcgtcaaggtataaacatagatacgcgttgacaaattccaagcataataagcatttggtgttggtgaaaaccaaaagagcgttgcaaagattgtaaaagcagcaataaagggcaagataatgagcaagattaactctttgattttgaatcgagtaataattaaataaactagcgcgaaggtgattactaacaaattagtaactaagctagcttttaaagatatttccagggaaataataaatgctaaaagaaattttaaactaggattcataagcttatctttctacatattttaagcgctgatccgcaaaaatcaggtggtaatcgcaaaattcagctagctcgtctatctgatggctaatgataaaaaacgtctggtggagcttttgctggctttctcgcattaattctaaaacgagtttgaccgagttatggtcaagtccactgagcggttcatcaattaataaaacctgatgcttagtcattagcattaatagaatctgtaatttcttctgttggccacctgagagagaataaacaacttggtctaagtgtttggctaaacccaatttatctagccattcattgaccttttcttcagtaaaaaataaatttctatcctttttacttaattctagttcatctttgacagtcacagctaaaaattggtcgcttgctttttgaaaaatttgagctacttgtgttaaatattttctagctgagatttgagcgatttccttatttaaataagcaaaattaccagtatacggaatcattttggtcattactttaaataaagacgtcttgccaacaccattagcaccagtaattagggtagtgccagaatgcaaatttagctcattttgcttaagcaaaagcttgttttgtctaatttggacttgttttaaagtgaaaataggctcactattaggtaagacaaaatgataatgtcgctcatgcaattttttattttgttcaaataaggctatttttttgctagcatttaattcaataacttcttgattatttgtaaactcaaaaagatggtcgcagacaggttcataatcgtctaaaacgtggtcacttaaaataatagtttttccgttgtgagctaaaatcgctaattttttaatcaaaaaagcacgtgtcttaggatcacaactggcaaacggttcatctaagagcaataaatctacatccatagctattaagacagctaaagcaactctttgttgctgaccgcctgatagagtattaatcttttgatcgagaaggtctgcaatttgggtgaaagctgttgcctgatctagtcgtgtttgatactcaccttcatctaactgtaaattttctaaagcaaagacaatttcttcacgtggagttggcattgtaaactgttcagccgcattttggaacatcattgccgccttttgtccgtgcaggtccaccatacctgttagtcgccctgcatatttgggatacaaaccagcgataattttgagtaaggtagatttaccgcagccggtcggtccaattaacagagaaaaaccatggggaatttcaatatttagatgattgataataggttctttttcataagaaaaagtaagattgttaacggttactttcataagcttgattgtacaagatgctttggggactgtctacaggtagagtttgttataagtagaacaaatcataaataatacttaatactaaataaagttttgatttataatgtaattatagtgttaccatattttatttaatttaaggaaggtggacatatggcagctgttgctttggaccaatatctggcaagtgtattaaagtcaaattcaacagataagaatgaaataaagttggaagctggtaatccagattttgatctgtttactatctaccttgaaaatcataatactggtattcatcgctatcggatggatgtttcaacgattttatatattgctaagggtactgtgacaattaagagtggtgaaaagatcattcaaatgaagtctgggaatgttttgctactgactgaaggttgcaagtatgagattttaagtcaaaaacctgatacggtactgataaagttgaagtttaagcgtggatttctatatcgcaagtattttaaagattttagctgtaagggagaacgtgaggttaaagttattgagcaaatcgttgatagcttagaaaatgaacatgttctttggctaaaaaataatcaaattactcgtgcttctcaagtgatgcaacatattattggcggttatttgaataatgatttgtttactaaagctttaattcaggctgagttgaccactatgttgattatttcaattagaactcagcgcatggcaacaccgactagtttggataaaactaagtttgaaaagaagaccttagataattacatcgatcttcattttgccgatgtctctttatctgacgctgcaaaatactttggcttcaatcctaattatttctctaatatggttaaggctaagactggcaagagttttgtggatcacgtggatgatcgaagaatgcaagaagcgcgtgaattgctggctcagcctgatatttcacttagagagattattggtcgagtcggatattcgagtaagtctttcttttataagaaatttaatcaatactaccacataacaccagcagcgatgcgggcagaattgtttagacaagcaaatatcaatttaaagtaaaaaaataatctggacgaaagttccagattattttttacatattttctaagcgtttaatgcggtctgctgttggtgggtgagtatcaaacaagtgcgtcaaaccgtgattgtggaatggattttcaatatataatccagcactactactatcagctactttcattggttggctattttcaatcttgcgtaaggcagaaattaagccttgcggattacgtgttaatttaactgaagatgcatcagctaggtattcacggttacgcgataaagccatttgggctagggatgcagaaagtgggcctaagatcaacacaaagaccaaggcaaccactttaaaaattatggctaaagcattactgtcacggtcatcgtcgtcatcactgcgcacgccgccccagaaccaaaaattggacgccatattagagataaaagaaatgaccccaactaataccacggcaattgttgaaagtaaaatatcgtagtttttcacgtgtgataattcatgccctaagacgccttcgagttcttcacgatcaagtaattctaaaattccttgagtaactgccaccgcactatgttcagggtcccgaccagttgcaaaagcattgggactaggatcaggaataatatagacccgtggcattggaacctgtgccaccatcgccatatcttctacgatatgccacagttccggattgtcggcttcatgaatttcttgcgcgtgattcaagctcataatcatgttggctggattttgccacatgatgaataagtagactaaactaccgatcaaagcaatagtaacgcccattgttggactattgctccaaagataaccgattcccgcaccaactaagcctaagatcaccaaaaagatgaacataattaacgccgttttgcgtttattacgagcaatttgttggtaaagcatggttaaacttccttaaaattaaaacttaacttgaggcacattcttttcttcactaggagtttctaagtagttaatcttagtaaagtggtgccacttggcaacaatatttgatgggaaagtaagcaacttttgatcatatgttgctacagttgaattataaagttgacgagagtaagcgatcttgttttcagtgttagtcaattcttcttgcaattttaagaagttttgattagctttcaagtctgggtaggcttcagccaaagcaaaaattgacttcagagaatcagtaatttggttagaaagcttcatcgcttcttcatggttaccttgaggcacattaaccaattgattacgtaatttgactacttcctcaaaagttgatttttcatgcttggcatagcctttggtggtttcaaccaagttgggaattaagtcattccggcgcttaagttgaacgtcaatttgactccaagcttcttcagcatagactttcgctctttgtaaaccgttgtaagttactatgtagatagccacgattaaaacaataatagctaaaatgatccaaattaaaggtgacatagtttttcctccataaaatatttatttaattttatcgttttcgaatttcttgagcaataaaaaagaatgtcaaagcggcattcttaacaaaaaatattaaattctgaagattaatagtaataatccaactgcagttaaaataatcaaaccagcaaattgcataatagtccattgaataaaaaactttttcttacttacgctaccgtgttggttgaaagtcttaagaactaacatattagccattgaaccgatagcggaaccaaaaccaccaatgtttgaacccaagaataatgcttgagcataagtggtaaatttaccaactaaaatggttgatggtacattgctcattacctgactagagataattgaagcaaagtaagttgaaatttcagaataaacggtgccatgaattagatttacgataagagggatttgttggatatcgctgatgaagatgaagaagccggtaaaggtaagaagtaaggcatagtcgattttgagcataatcctaggattaattgcaagggctaatgcaaccgacgttagcatttgccaaataatatcaatggttctgaaaacaccaaagaagaagaaaataaagacagcagtagttatcagcgtcgggcgccagctgatcttgattggctcagctttttgcaccggaatttcttctttaggaataaacagaaagactaatcccatgattagcattgaaactactagataaggtacagaccattcgaaaaattttaatgggctgacatcaaagcggctgactgagaaaatattgtgggggttgccccaaggcgtaaatgctgccccaatatttgcgcccatcccaatcaaggtaacaggcaaaatctgtggcaatttataacgcttagcaatatttaaatacagtgggatcaaggtcaatgcagtaatgtcattacctaaaaacatccccgaaatgacagccaacaacgaaaacagcgtgttcaacttacgcgtattatcggcaatacttgtaagcttgtacgctaaaacatccagaacatgcaagtatgcatagatctggataatcgttaacatcgcggcaacagaccataatgtatggaagttaatgtccgcaaaccgcggtctggcaaaaaaaagactgactactgtaatgatcacagtaatctgtaaaattctatctttagcaatattctttaagacggtcataaaaggtcccccttacgtattacaatcgtctaaaaaccctatgtaccattttgagcctttttgttattgcatgcaatgataaatttaaaaaaatatcaagattagcggtatttttgagcatatttttagttagttggaactagtcgtgctatacttaaataagtaagttaataaaatttagattgaaacgaggaaacaaaatgacagagaatgcaatttcaatcaatattaaaccagatgctgcagaaatgattaaaagcaagatggatgcagatcaccaaattgttatcttggctttagatgatggttcaaccaagtattctaaaaaaggcggcacttgtactattggcgacagcttccagtttgtaatccttgctgaaaaagatcctaagtataatatttcaatcgaaaataatgctggtcttgacttgtatactgctcagccggaaacaactttctttgaaccaggtctagtggtaaatgcacgcaactcaactttgagtttatcttcagacagcggcattattgatggtgggatgaccgttacccaatatgaacctgaagcaattactgctgatgatctaaaaaacggcggtcaatgttaaaaaaataaaattaatcatagggacgagggaatgacctcgtccttttttagtatagaattaagaaagtgatttcaatgtaaggggggaagaacaatgacttttgtcaaagaaataaaagcaggtagtcgtgaattttgccaaaattggctgcggtatctgctactttttatgggattaagtttatttaatcaatttattgttattccactttttcgctatattacaacctttgttttgcaggctagtgctattccgttcgtatcttatcaaaatgtagtgacgatcattacgacgcatacggttgcctttttaattttgataattgagttgctgcttttattagtaatcttgtatgcgcaattagcttatttacttcatggcgtttgggatattaagcatcaagtttttacgtggaaaaatagttttattcaaacttggcaaaatatcaaaaaaattcgtttgggcacgctttttattttgatgctctattttttattggtagtaccgttagccgatgtcatctttagaacaccacttttaagcaaagtgcagatttcagaatttatcttggattatctgacgagaacgccaatcttgttagccgttttgattgcgttttatttagccgctttgatccttggtgcaaggctagtatttgctttacccatcatcgtttttgaccacttaaagtcagtgcaagcagtaaaaagaagttggcgattaacggcgcactaccgttggcggacgatttgctggaggattattgttttagccgttttatctgcagcagtcatgacaattttctatttagcaatgtattgcctgcagctattagttgatttattacctgggaaatgtccgttaattttagccattatcaatctttcgcttgttcaaattattagtgaagtagcgttagtctatgttagtgtactgggcttatctattattttgaaagctttaaggcaagaaaagataagtcaaacaggtaaaactaaaaagataattctaagtacattagttgtgtttgtactagtaatgattaatgcaatatccaccaattatttatatttgactagtgtaaatgctaaagcgccagtaattatttctcatcgcggcgttgatgataaaaatggcgtacaaaacacgttacagtcattaagaaaaacggctaaagaaaagccaaactacgttgaaattgatgttcatgaaactaaggataaaaaatttatcgtaattcatgatgagaatttattgaagctaacgggagttaataaagccccgaatgatttaactttacggcaattagaaaagttaactgccaaagaagacggctatcatgctaagttagttagctttgatcaatatcttgaggaagccaaaagactgcatcaaaaattgctaattgaaattaaaacgacggctaaagattcgaagaaaatgctgcagtgctttaatcaaaaatatggcaaaacgattcttaaaaatgcgtatcaaggacaatcactcgactatcgcgtggttgaaggactgcacttaattaatccacgtttggttgtcttttacattcaaccttataattttacttatccgcaaagtgttgctagtggatattcaatggaatattctaccttgaattcagactttatttggcaagcccatttgcaggatcgtcctgtttatgcctggacagttaatgacgaaaaattaatgaagaagatgatgtatcaacaagttgatggcttaattactgatcgagttgatttagctaaaaaggcaattaaaagtttccaaaaagatgctagttatgctacgcgaatcttaaattatattgttgtcctgcatctgtcgaaaaattttgaatctgcatgaagacttgatctgaagggctggacatggtaaactatactagattttcgaaaatctgaaaggaagtatagcatatgcgtaaaggtgaaaattacaacactggttgtgaaccaaaccaaagacctaagaacaagagaaacgcaaagaagcgtgttgctcacgtagcagcagttgttgctttcttgaacaaggccgcaaaagatgaaaacaagtagtctttaataatattgaaataaaagctaggagctgacgcctctagctttttttgtgcttactgaaaaaattaattctaagtgtataattttttacggtaagttgaataaataattaaaaaagcccaagtcctttgaatttggacttgagctcaaacaaaaagaccagtagtctgatgttaagaacaaaaaacacattagaagctggtcttttatgaattcaattgtaactgaaatcgcaaatattataaagtctgaagataattatattaagcgtgaaagaaaaataatctgtttcttcttaaacctgattaaggaaatcatggccttggctttagctaaagttgatgatgaaatgattaccaaggttaaagcacagcaagttcttagttaaaatcacgccacttaagcgttacccaaaagttacgttagttgtaccagctcataatgaagaattagttattagtaaaactacgcaggcaattttaaatttgaattatccggctgataagttacaaattttaatctatgctgataattgtactgatgatactgctaaaattgcccgggaaataatcaagcaatatcctgaacggaaaatcaatgttcaagtaattgaacgaacaggtagtggtggcaaagctggtgtattaaatgatgctttgaagattgcccaaggagaataccttggtgtatatgatgcagatgccatgccagaagaaaatgctttgtattttttaattaaaaagattttggaaaatccggtgagatataaggctgcttttggtcgcaataagacgagaaatgcgcggcagaattttttaactaagtgtatcaatcaggaaattgttgttacccagcgaattcaacactgcggtgtctggcaattatttaagattggtcgtattccagggactaactttattattaatactgattatgtcagatcaattggcggctggcgcaatggcgctttgaccgaagatactgatatttcttttaaaattatgggctcaggtagtttgattgccttagcctataattctgaagccttccagcaagaaccagaacgcttaaaagattattatttccagcgcttgcgttgggctaaaggtaactatgaagtggtgatcaataatttttgccatctttttgataaaagcaactggcgggttaaattagagactgtctattattcctgcacttttttctggtttaatttggcgattgttttatcagatctgatctttttttctaatttgattgccttaatcgtccatctttggaatcctgcagtagtaataccatttacaatttcgcggagtaatattttattagctcaaattctgctctttaattggctattgatggttttgctttatattttgcaaattaacctagcgatgactacgcaatatgggcaggcaactgacgaacagatttggctagccttagcatcatattttacttattcgcaattgttcatcattgtatcaattcatgcggttacttcagtaatgctagatcgcgtttttcatcgtgatagtactaaatgggttaagactaagagatttgcggattaggtgatgagatgaaaaaaagatggatgctactaggatttttactcgtaacgattgcatttaccggtattatgatctatatcagagcagataataattcagcggtgcgtaatttttttctacattcttggcataaaaattatgtagttgaagaaaagaatcttgcctatattaataccacgcctaagcaggaacaagtgacggttttatctgaaggccaaggatatgggatgtttattgcggcgcatgatccagcagttaaagaaagcaactttgctaagctagtgcagtattatttaaaacaccgggatcgtaatacgcaattgatggcttggcggcaaacaaagaaaaatggaaaatggagcagtgaacgcaatagcgctactgatggggacttatttattgctaaagctttgtttttagcggctaaaagatggaaaaccccagcatatcagcggcaagggcaaaaattaattgccgatattttgcgttatgaatataatccgacaacgcacgctttaacggtgggcaattgggccgattctaagtcgaagtattataatttaatgcggacttcagatgtattgccgacaatgtttgatcaattttatcgtgaaagcaatgattcgcggtggctcttaattaaaaaaacaatgctcaagcggctcaatcagttgagtcaccagcataagagtggcctagttccagactttgcctggctgacatcaaaagatgctaagccagttaaaggaagggttaccactgatcgatatgatggtgattattatgccaatgcttgccgggtgccaatggatttagcatttagtaaggataaattagcaaagaatactgtacatcgcttgcttaaattttttagcaagcaaaatacaattacagcaggctatactttaaaaggcaagccggtcaataattatcaatcagctagctttagcgcgccaatttatattgcggtgaatgaaaatcgcaatcaaggctatgataatttgtttgcttcgcagcaatatatttttgctaaaaaattacctaaaaataattactatgatgcagcactaacgacgatggcaacgatactgacaccggcgcatagattttaagaggcaaaggcctctttttatttgcattgaaaatcaatctttgataacatagtaaaaattttaaggaaaatgaggaggacaaaaaatgggattaaatgcatacattcaaggttttaacagtttagagtcaattgatcgagcaccgggctacttcaagtatcatcaccactcagtagctgaccactgcttcagaacagcggaattagcacaaatgatgggagatattgaagaagtaaagggcaaaaagaagatcaactggaaggctttatatgaaaagagcttgaatcacgattatactgaacgtttcatcggtgatattaagacacctgttaaatacgctactcctcaacttagaaagatgattggtgacgttgaagaaacaatgaccactaagttcattaaggatgagattccagaagaatttcaagaaatttatactaaacgtctctcagaaggcaaagatgatactttagagggtaaaattttatcaatctgtgataaattagatttgttatatgaagcttatggagaaatcgaattaggtaatcctaacccggtttatatgcaaatgttcaaggaaagtcttgaaacgatcaagaagttcgacgatttagtttgcgtacaatactttattaagaaaattttgccagatctttttaaaggtgatttcgcgggaaaggataagatgcaacgaatagcttttagcattctattgttaggggatgattaggtgaaatttcaatgtagttcatgcgggctgcgcatggactctttgcattttaagcaagaggggttaatgaatcctaagttgaccagtatttgcgacatttgtatcacgcgcaacctgaatccagaagattacgcaaatgatgcggtcgcagcttttgctcaaagcttgctttacacgtttgtcggtgcaaagaaacaagatcaatcaggttttattgtgaaaaataaaaaggaccgtaaaaaatacgaggcctttttacaagattatgatggcaatgaaatcgcccgccaacagattaaaaggtctgatttgaatttggcggtaattaaaagcgaagatggcaagcttaattatgtgcctaaccaaggcgtaacttttgagcaaaatttaaagggaatgggtttggagatcaatttccagttaaacgaagttgattttattgatcgtgaacgcattcgggccaagtataaataccgctgccaatattgcggcagacgtggccacagcgtagatcataaggatcccgtttctcttagtcacaacaacagcttagataatttaactttagcttgtgcggaatgcaaccgaattaagtcggatatgccttataagttgtttattcaactgaatgatcaaatttctgagatcaataaaaagctagttaagtatgaagatgcgctgggtactttgagagaagaatttgagcatcgtcggcgctatttagcggctcaagtacaccttaagggtgttatcaatgatcctgagctaaatgcgattagaaagcaaaataagagcttacaggatgacattgatagtttacaaagtgattatgatgatttgcgtcaaacgcgcaagacgtattttgatacgggctggaaattagctcgcattaaggaaaataaggatattatttaaaacgtaaaaaagcgctattttttgtaaactcaattcaaaataaaaaatgagttttaaaaagatcatccccatataggaatgatctttttaatttttatctatctaattcgatcttctggatcaaataaatatttgtcccatttaacttcattttgaacagtagggtggaagagcaagaatgctagcaacagttgaccaacgtaaggaattacgcccagccaccaccaaccaccgttaaagcctgcgtcgtgcagacgacgaacagtgtgacctaattgtgctaaaaaggcccaaatagctgctgcaataaagaaaataataaaaatgatgaagattacaccgattaccttggcatcgccagaatcaaattcagtaacgctgaaaggagctaaaagcatgaaagcaagtaggtaacaagcaaatacgccgattgtcatgataacttggctaattgcagtacctacccagaatgaggttctagtagatctagcatcccacttaaagcagtcaaagaagtgttccttcaagatttgaccaatagttggtacaggaacattactttttgcgccacccttaggataatcttgatcgctgaacaagtatttgccccacttaacttggcgttgaacagatggctgcaattcaagataaaataaaaacattgcgccataaccagtgaaggcagcccagtaccaatagccgctgtagccaacatcgtgcaaacgtcggatcgtttgtcctaatgcagctaaaaatagccacagataaacaacagccgcaacaataccatcgactattctaatgccggggttgatgttttggttaaaagcatagaagccaagaaggatgcataagatgccgataacaagattaatcaaagtgctccaccagaaagatttacgcgtagttcttgctttccagttgaagggatgcaaataagcctcgttcaaaatttgcgcaaaactttctgcaggcggcagtggcagactttcgtcataaggcttgataaaataatatactctatcattcattttacttcctccaaaaattaatttgttataaattatacgctaaaaaagccgtgaagcaattaaacttcgcggcttttttgatattagaattcattatttctaaagttgctcaagaacttttgcgtcttttcattcttaggatggtcgaataattcttccggtgaaccttgttcagtaatgataccgtcactgatgaacaatacgcgatcagaaatactcttggcaaagcccatttcgtgggtaacgatcaccatcgtcaaaccggttgtagcaagcttttgcataacgtctagtacttcgccaaccatttctgggtcaagggcactagttggttcgtcgaacaataaaacttctggattcattgaaatcgcacgggcaatagctacacgctgctgctgaccaccagataattgttgtggcttagccttaatgaaaggatccatgccaaccttttctaggtttttcatggcaatcttgcgtgcttcatctttagaacgtttcaagactaattcttgaccgaccatgcagttttctaaaacatttttattttcgaatagatcaaactgttggaaaaccataccaacctttgatctaaaggtattgcggttatagccgggatgcaagatatttttaccgtgaaaatcgatctcgccgccagttggttcttcaagcaggttgatacaacgcaaagtagttgatttaccaccaccagaaggaccaatgatcgttacgatttcgcctttattgatgtcaaaggaaatatcctttaatacttggtgatttccataagacttttgcatgtgctttaagcttaaaattacttcgtttgattcagtcattaattatttgcctccgcatcttttggagtaccaacttggacttggttagccatcaagttgtaattcttattaccttcaagtctcttttcgataaagttgaagattctagtaatagtaaaggttaagatcaagtaaattgctgaaatcattaagtaagttgggaagaacttgaatgattgactggcaatagtagtaccaacgaagaacaattcagaaactgagatgatactcaatactgaagtatccttgatgttaacgataaattcgttggtgattgatggtaaacagtttctaatagcttgaggcaagatgatatgccacattctttggttgtgggtcataccaagtgcactagctgcttcgaattgaccttctggagttgaaataataccaccacggataacctcagctaagtaagcaccagtgttaattgacacaataatcaaagcagctacagttctatttaaattcaagtgccagaattgggcaataccatagtagattacggctgcttgaaccatcattggtgtaccacggaagatttctacataaacagataataaccacttaactacgttcaaagtccaacgcttgccgcgagtagttggagtaggaatggtacgaataattcctacaagcaagccgataaagaaaccaacaatggtaccaactaaagctaaaagcaaggtcatgccaatacctgacataatcatgccaccatattgcttccaagtagtaactagccagttttctttcttagtttcgttaccagccttaggttgttccttgatggcttgtgacattaattgatcacgctttttattagaaatagttcttaaagtagcgttaacttcatttaaaagcttggtattaccctttttaaccccgatactagttacggaatcgtcatggtcaactttgaagccagccattttgtttaagttaactgcaataatgttagggttaacgttgtggtaactttcaaattcaatatcttcagcaacataaccatcaatggtgccagaagctaaactttgacgcatggctgaaaagtcacgcatagctggttctcttttagcaccttttaattgcttgattaaatcgtagtgcaaagttccttgttgtgcggttaacttggcacctttgaaatcagtcaacttcttagcattagaatatttacttgccttattagtaattacgacgaaagtacttttacgataaggttctgagaaattaattgccttgcgtctttcggcagtaggagacataccagcaataattaagtcaattttacctgaagttaaagctggtaaaaggccatcccattgagtcttttctacgattacttttttgtgtagtcgtttaccgatgatcttggcaatttgaacatcataaccattagcataggagttagaaccatcaattggaacagctccattagctttggtgggctgagtccagttgtatggaggatagtttgcctccatacctatctttaacgtgccagaatctttcttagcagcttgagtctgattgctactaagagaaaaaccgataaataaactgagtaggacagacattattacagccatccatctaaatcttgacttcaattataaaacctccaaaaatagttttaacataaagccaacacaataaagagtaaacaaaaacctcgctcttccaaagaattgcgagggtcataatcatcagtgtttaaaccaaatcttatagcgctccctggggactaaccaggacagtctatagaatattcttctatagcccaacagattaacacgcgaatattaaatctatttcggcggcaaccctaagttaactatcattgttttcgcgaactcaaacttaacttgtgattgtcgcaacctctattgcattggaaaaatatttaactaatgaagaatactagaagaaaaagttaaatttgtcaagcccaaccattattagtttcataatttctctttttcatatcagaaacataaggatttcctgctacataaaaacgtaatttcttgttagcccaaacgggatcagattgattgataccaacacgcgctgcagcaattatttcctggggaatttttttatgacgatcatcaagatcaatggcgaaaggggagtctgataaaaagtgcaaattccaattcttatcatgaataccaaaagcttgcatcatttttgcgggaccattagtcaaaagaacgccatctttaccatgacggttcttgatcatggtctcaattcctaaagtgggatcgattgcacggattaaaacaccctgtggttcattctgaaccttagtggcaacatcaaagaaaaaatattgacgttgcgcgtagatatagatcgttccgcctttgccgtaaagtccttcattcgctgggctacgacgaccgccataagaatgtgcagcgcgatcctttttacccatatatgcttctgcttccacgatatagccgcctaatttttcttgaccattatcaaaagtaagcattcgcccaatcaggtcttttgcaatataatcggtagtgttagtagaaaaataagttgaataattcatttttgacctttctagaaaagagataaaaaataatgacagaaattaaattagttcgaatttatgaccatgagcaacctgctggttatcggattttagttgaccgtttatggccacggggaatgagcaaagttaaggccgatttagctgaatgggataaacaaattggccctagtaaggaattgcgtcagtggtttaatcatgaagatgaaaaattccctaagtttaagcaaaagtatattgaagaacttaatcataatgattatacagcggaatttttgcaagatgtaaagaagcatttggctaaagaagatgttcttttcttatttggtgccaaaaataaagagcacaaccaagcagttgtactcaaagaatatgtattaaatacgctaaacagttaaatatgtttgtgaccgtgttttttaactttccaaaagtggaagagaattgtcaaaattaagatcgcaaagacaataattgcaaaaacggtgtttggcaactcaaatctcaatggtggcagagctagtagcaattttaaagcgatgattcctatcaataagtaagccattggctgcaattctggaataatatccattaatttaatgataatttcggcaactcctctcatacagagaatgccgatcatgccaccgattaaaacaacaacggggttatcagacacggctaaagcagctaaaacagaatcaattgaaaagacgatatccattgattcaattgaaataaccgtacgccagaaaagagatagcacatgtctctttttctttttgcctttgtggcgagctgcttcgcgctcttctttttctttctcatgttcggcagcttgtttagggtggcgttgatcatagaagaatttaaaggctaggtaaaaaagataaatactaccagctaatttaatctcccaaaagttgatcagataagtcccgattccgataacaataaagcggaataaataagcaccccacaagccataaaccaaggacttgcgttgttcagctttattaggtagcacctgtgtctgtgcggccaaaacgacagcattgtcgactgataacaagcattccatcaagattaaagtcagaatgatcatccagtctttgccactggttaggacatgtaaccagttattgccgtcaaaaaagggtgcatatagtttaagaattgacatgtagttgcttcttttctaatttaattaatctgattttttctttttgtcccagacgataagtcccaactttattgttggataaaataactctttggtcaggaataaaaatcaaaacagggtttaatgctacggcgtgtgcaactgagcgagaagatgtggcttcggctagtgaattggcgacgtcaccataagttaacgtcacaccataaggaatatgctggacaacggctaatacctttcgttgaaattcagtgccgaattccgaaatatcaataggaacatcaaaattctttctgataccagcaaaatattcctttaattgtttgatatgaggtgccatctttttagggtcccgcaccaacatgcggtgagggtagaagctaaaaataggtgaaacagtttcatctcctttaagtccgacgtaagttaggccggcttctgaagctgttaaaaagtaggtccatggctcaattgtaacgtaatcatagtaaaaaaactctgtcatgtgtaacatctttattaaaaataattagtctaagaataacaaactaggaaagttaattcaaattctggaatgctgttaatgcatccccaattatttgcgtgacaccaggggtaggaatttctgtcttgttgatagagtaaattttggcgtcttctttgcgataagccaagagctgggcaaaaggataaactacaaaactcgtcccacaaatgatgatcaagtctgatttttgcattatttcaacggactggtttaatactttcggatcaatgccttcgccgtataacacaataccggggcgaataattccgccacaatctttgtgtaaatagcttttagcatattcttcataagaaacaggttgatgacatttagtacaataaatattatataaattgccatgaaattctgttacatgttgattgccagccttagtatccaaagtatcgatattttgggtaattaaattacctttttcattacaaaaatgggcgattttttcatggattaagtttggtttagcagtaggaaagtacatattgttcatgacaaattcatggaaaaattcaggtcgattgaatagcgtactatcgctcagtatagtttcgggactttcttgcacgccatcatagattccgtttttagagcggtagtcagggatacctgagtgggtagaaacaccagctccagttaagaatacaatatgttgggcattattaatatctgtttgtaattctgctaaatccatcatataatgtcaccctccgtgaaagtcactactttaattataaatcattgttttgttataatgactgaaaattgaaagcaccaaaatcaagctcaagtcctgtcactattgagctttcttagacgtaattagtttttatatgatctgtttcagtgcaatttgtatgaatcgtggcagttggttaataaagtcattgattacttcatctatcttttcaaaactattctgtttaagctcttttaattctgaaattaagtagaccaatgcatctacgaatctaatatcaggtaaggattcgttcattagatagaataaatctccgattgtcttatcatctgtattttgtctttcctgccaggtcaatagatcataagttattgctgtaactgcgatatagccacattggccatcatagctttgaacttgagatttatctaaagcaagatattgcttagacgtcttaaaatatgtttcaatttgccatctacgaccataaagttggatgatttcttcagggctaagctttgtctgagtagtagctaaaaccaaatacttgttcttgtttccacggttggagacaaagacgagctttaataaaaagctatgtccatgatattgagcctcaactatgcttgaataaagataatgtttctttttacggatgtttgaagcagccaaacgatcatacaagtctttaacgctatagcggcgatggcgataaatgtaataaatctttgaactcttcttgatcatgccaagtccatctaaaccgatcttctttaaaatccaaaacattcttggagaagaaaaccaagaatcgaataagacgtatttagcttctactcctaatcgtaaggcttgtctaatcaactctacagttacatcattcatctttctctgagcttgatttctccttttaccagaaattgaacgttcatcagcagtaatgggagcagctccaatcatatttttcttggttttggttgacatcaaggcaaagttaaccggcaagaaggtattgccatcgctccagcctaaagttaaaccacgatatccgttccaatactcatgcttgtcatggtcatagactttagctagcaattcggtctttttagaaaaagaccgagccatcagcgtatcgtcaacgataaaagcaagtcggcgtcttttatcgataaatagttttaagcagccaatgagccgggctgcaatcaagcataatagtttttgccagttgattcttccatcgttaagtacattgcgagcagttctaacggaaaaacgtttgtcatccttagctctgaataaagaaagccgagcaaaatgtactgacatcagccaagagataatcatggttaatgaaacggtggatttacgcttaaaattgacttgtttagttaacttagctagaccaattagattaataaatgaagaaattaaggatttagtatcattttctgtgtcgatttgttctatactgttcattgcgcaggatctcctttactttttaggtcgacacttaaagtataacgcagagagagcctgcgtttttatttttgataagaaaaagccaagaggcgcggggaaggagcgttaatcttagctttcaagtttcagtataatgattaaaataactaaattgaggggatttttatgaaatatatgacgtatttttatgtagcaattgatattttattagtagtttatgcttgttatagttggtattggcaagctaaagttgattttcgtggtcgctatcgtatctcctcagttgtttgggcgctaatttttatctggctgggctttacatggaattacattgaaaaaggtgatccaggcctgagcgtcttcttggctctttttatcttaattagtattgtcgatggtttttcaggatttagtaaaaagcggatggtcgtttcaggctacttcaagcgtacagttaagtatgatgatttagccagcgctactttaatccagatccccaaccaagagaagccattagtgatggcgatttttcgaactagcgatggtaaggcttatatgatgcgctttaataatgaagttaatagcgtaattaagcaattacaagaatatgctggtcgagaaattcctgtcgaagttcaatcaatgatgtaattacaaaattggagaaagcattcgcgagaatgcctgcaaagtccgcaatgcgcgactttgcttttttatttcttccttagttagtaaatgcgagtgtttcatatcttcttcaaaagctgccaccattttctggttgaactttttatcataaaaaacggcattatcttcaaagtttaagttgtaagaacggaaatcttgattcattgaaccaactgaagaaaaatggtcgtcgacaatcgtcgttttggcatgtaaaaagccatcttcgtagatataaattttgacacccaagcgagttaattcgttggcataccactgtgtggcgcgataaataaaggggtggtctggcttacatgggatcataattcgtacgtcaacacccgatgaggcaattgtttgccacgtagcaaaaacggcatcatcagggattaagtatggtgtttgaatccataaccgtttgcgtgccaaaagcattagccgcatcataccgttacgcatatatggtgcataacgatcaggcccgtctgaaatgatttgcgttgcaacgtcgccttcgtggatgtttttttcatcaagatcaggaaatagagtggaattgaaacgtatgagctgttgattattagtgatagaggcattccagtccatgacgaaacgctcttgcaaaagcagagaggcagaaccaacaattcttacctgactatcacgccaatgaccaaacttcttttttttgcctaaatattgatcaccaatattaaaaccgccagtccaagaaattcgcccgtcgatgacaacaatcttgcggtgcaagtggtagttaatgcggtaacgggtgatcatgttgcgtgaagtgacaaaaggcaaaacttccccgccagctgcccgcaattgatcgaaccatgctttagtagctcccattgaaccccaggcatcataaattacgcgtactttaactccttgttttgcttttttaatcaatagttgcaaaacacgattgccgatattgtcgctataaaaagtgtagaactcaacattgattatttccttagctcgtaccatgtccttaagcatgtcatgaaagaaggtttcaccttcggtatagagcttgacctgattatttttagttaggggagcttcttgttgatggttaaaaaagttaattgctatattaccagcctttgaagtgtcagaaggactagtatttttaggtgctttagcaatcgatttttgaacatttctcaagccaatgtgtttttgcttattgatggcaaaaatattttcctgggaaataccccgaccaaagaaggcataaagagtaatcccgactactggtaatactaacaggatgattaaccaagcccaagtggttgaaacggatcttctacggtggaagacaacgtagaaggctaagattgtgttggtaatgataatgattctaacaaagtcatgccaccagatcataaactcctccaaaattaaactacttttttaatttaagaaacttgtcaataatatcgattacaaacggattgtcatgcatccaactatgttcggcgtcatctttaccgcgtacttctacttcttgataaaaatgtgcttttggggcaacgatatagcgaatgctttttgcggaaacaacagagatgaatttatcagtatttgtgttatctaaaacgttgccataaatattcaagaccgagatatcaggattgaatttgcgccgattaaaaaacaaataaaggtagtgcgggttcatgacactaggccgaccactttcggtcaaatagttgacgtttgggatatcgcccaagtaagtgaccccgtcaaaaggaccagcgataaaggcacatttttttaaatgtgggaacgttttgctgcggtagtgcttcatttcagtgcgaataatacatggacaggctaatgaatgagcgactgcaatatagtttttaaaaccatatcttttagctaaaaagggcaggacgaagttgagataatagtcgatgccatagataccgactattcgctggcgaaaagcaacctgcacgataggatgcttgtcactagtccaagttccttctaatttgaaatttcctaataaatcaacggttacctttaaaaacttgggattgcccttgtcataagtagcgtgtttcaccatcacgcgagtggtataatcaccgccgcgaaagccatggaaataaataatgggtacttgttttagatcgcttttttcaatgtttgccttattttcaatatggcgcttgtgtaatttgaggaaaattcgcgtgggagcgaaggtggccatcagccccaaagaaatcatgttaaacatgctaggttcttcttggaggtcatgtttatgatctttttcaacttcttcagcatatttttttgtgttgaaaaacatttttaccaccttctctttcttttttcctataataaaagttatgcaataagtatattttaccattgggtaaagattttggaattttagaggtagaaatgaagttttatgcagtcaaaaaaggacgtactccgggaatatatcggacttgggatgcagccaaagaacaagttgatggcttctctggtgcagaatataagtcatttgaacaaattaccgatgctacagattacttagattggaatgcccaaactcagagcgatgtcctgcaaaaaggtgaagataatttacaaaacgccgtaaaaagggtgcaacaaaagagtcaagaaataaaaaaagcaccgcgaaaaaaggcgaagcagtataaccatgttaatagcaatcctgctgacttctttgcggtgacttatactgatggtggcacgcgcaatactggtgtttataagggcggtcacgttaaaaagaccgataaagcagcctgggcttatttaattgaatgggatgaccagaaagttcatggctccggtggtgaatatggtgctactaacaataagatggagcagacagcattgattaatgcactaaaaaagctgcttgagcttggttttaacgataaacatctattatttgttcttgattcgcagtatgtgttgaatgcgattaataagcattggctacaaggctggaaaaaacgtggttggagacgttcttctggaccattggctaatgtggcggaatggcaggaattagatcggttattaaaggaatttcctgatagtacgtttgaatggacgaaaggtcacgctaataatcgcggtaatgaatttgtcgatcatgaattgaaccgttatatggatcaaaaaatgtaagaaaaaaggctacactgtagccttttttaatttaaaataacgccgccgaacaaaccactaaagaacttaacgatttgatcccacaaattttgtaaccagttgcggttttcttgggtattaaatttattgaagatatttttagctccattttgaatctgactggataatttcgaagcctgttgcttgaagttaccgtccttcaatgcccctgaatcacgaatttcaattagaagattgacaatttgatttttttgattgttgttgatggtgtcacctaagtggttaatattaatttgattgttgacaatgtcgcgaatttgactgtcggtaatgttttgcccttgtttagccatctcattcttggcaccggcaaccgcattgttcaattgagcatctgaataaccttttttgtttttattatcttgggtaatcccagacaaggtattcatttcatcttgagcggcattaacttgcttttgatttaatgcattgccatttttagcataggcagcataaactccagctaatgcccctgaaccatcaattggaatagcgctagtaacataaatgttggcatcgctgatgccggcggtcagggctgcgtttttgtactggttggcagtaatagtcgtgatattatttttaccatcgtagtctaaaattttaacgttgattccgctgcctgagctggtcttttggatcatcgcactggaccaaacaccggatgaagtggtgaaattatcaccagagggatttaaatatttaaccagatctgagccggtaacagtaattgtttgataattaccaccgtttagtggggcggttaaggtctttaatgtgccttgcttttgcgcatcagttaatgatgtacctaaggtaactacaggtgtatcatcatctgctaatactggcttagtaaatgagatcatcgcgaccacgcttaataacattgctgtgagtagtgtgataaatttcttcattttttcttcttttcttcctttttgatcgaatatttattcttgtaatacggaacattatactaaatatttttcaaaagtgaattaaacaacacgtaaaactttcttaatttcgaccttattattgaagatggtataataaagagcaacaaagggggacaatatgttacaagtgcctaagttaaccatcatcatgcctgtttataacacggcgcaatacttgccacgtgcttttgatgctctgcttaatcaagttgacaagagcttcaaattgcttgtagtagatgatggctcaacagataattcggttaaggtagccgaaagctatgccaatcgttttccatattttaaaataattaaaaagaaaaatggcggcccatccgatgcacgtaatgttgggatgcagtatcttgacacaccatatgtcacctttcatgatggtgatgattgggtggatccaggctacacatccttttttattcatgcttttgaaagtcatccagatgtcagcttagtatcatgtggctattggatggattatcctgacaaaaagcaacgcgttgttggtcgaccagaaggtggctatttaacgcgcggtgaaacttatttgaagttgactaatgtctttagctcaccaatgaaaggatatagctggaacaaggcctataaaactgccattattaagaaatatcatttgaagtttgatagggatatttcactactggaagatcagatttttaacgttaaatatatttctgtggctaaaggcgtctactacacgcaaaaaccttattaccactactggcagagaaagggcagtattattcaccagcctaatattaaaaaagttgcggataatttccggggaaattaccgggtttggagcaaaattatcagtacaatgatgaaagaccgcgaggaagaaaagatgcgtaagaagttagagcgacagcaggccttgcgtgatagtgaataggggaaaacatgaaagaaaaagttaatggagtcgaaatttattatcataagttaggtaaaggtgagcctttgcttttactacatggacatcacttagatggtggtatgtttgataaaattgtggctccgctttctctttattacaccgtttacgtgcttgatatgcggggccacggccttagtgaaggcgacattgcggaacactacaagaccgaagtagaagacgtctatgcctttgttaaacaggttggcattgaaggctgctattgcttcggttttgatgcaggtggtctggtggcaatgatgctagctagaaaacatccaacgatctttaagaagatgattgtagctggcgttttcgttaatggtgcaggcattagaccatatcactacttaacggaaggctttcatcgctttttgagacttgatcgtgacagccgcgtagagttgactgagtcctttatttcagtagatgacttgaagaagattactacgccaactctttgtgtagtaggtgaaaaagactgggttaaggttgagcatgtacgttggtatagccaatttatgcccaatgcgcggttggtgattatgccacggcagacgcatgacagttatgcagtgcgcagtttaaaactgctggatttgattaaaggattttgtaggtaatacgcgtggtgctagttaaatcgttctaggcaatatgccatattataagctaaaatggctatttctagccgctgctgaaagccagctaagctccttgctcggttattttcagcgttatagtaactgagcaaagaaaagtcgctttcaattgttcttctaattgccatcagttgatgattattatgttttttagcacctttcatgttttttcgatatggtgtccaaaggacatagcccataccttttaactcggcagctaagtcttttcctaagtagccttcatcgcctaaaagataatggttaattggatgagcattaatcatcaattctgtcgtttctttggcatcatgcactgatgctttagtgactgcgtagtcaagcaaatagccatcatcgcttactagcgcgtgcaccttgaaaccataataatagactttcttggttgctttatagccaatatcggctatgtcacggaagatcttaacacgataattacgaacaggctgacaaactggaacaggaaaactgtcaataattaaaaattctccagcaacctttacctcttgattccaagcttgacggatgcagcgaattaaaggcaaaagcatcttggctcgacgattaaagcgagaatgagataagccaacaaaaaatttacagaatcttctttgggattcaattccaatttcagtttgccaaatgagcatcgctaagatggagctgtcggaaagctttgtttgatcaatgttttttcgatgcgtaagcttatcaggcgcataaagattatatagtgaacgacaaattacatttaaacgactaaaactaacttgtaaatggtgagagaaacgattaagcttgaggtagttcaattagatcagactcttttctatttaatttacttacaacttgagtctaatccgattggacttttttattaactaaaacgatttaactagcaccacgcgtaggtaatgtggatagtattgctggttaacgtgatagttgctgcagttgctgttatatttggttttcaaaatagggtagaaacattaaatctgttcaatgccggtatagtttttatcacttttgggattgttttacttttaggtgcaattcctgtttatcaagatttcagcacgtcatcaattttaatgttcattgcaggcattttaattattgttagaattattatgctagctgttagtttaattaccaaagtgccaagaacagtaaatctacaggatattgcaatttcattgatgatcgctgcagtttgtttgatatatttcatgcacggtttaaatctgagcttaagtaatttagtcgtgccagaattagcattgattattggcattattttgttttattttaaaagaaagcgtcaataaaattgattgcaaacatggacatctcttcaatagaggtgcctttttgtatataatggtggtgtatacgatttttattcagaagaggtaaataatgaacaaggaagaacttcatcaattattgcacccaatgaaagttattggcttaggtggtaaccctgcattaaatgaaaaaattgcggcaattttacaccaaccattgatcgaaactgcggttcaccactttagcgatggtgaaatccaagttaacattggtgaatctgtcagaggttgtgatgttttcgtaattcaatctatccaagatccagttaacgaaaactttatggaacttgaaattgttttggacgcacttcaacgtgcatcagctcatataattaacgtggttgtaccatacttggcatattcacgttcagataccaagactcgttcacgtgaaccaattaccgctaagttagtggctaacttgcttcaattgactggcatggatcgtttaattactgttgatctacatgcctcacaaattcaaggtttctacaatatccctgttgatcacttacatgccattccacttcttggtcaatacttcttagataacggaattgctaccaaggaagatgatgatatcgttgtagtctcacctgatcactcaggcgctaagcttgctcgtaactttggtcaatacttcaatgcaccgattgcaattgttgatcaaagaggtgctcgctatgatactgaggtccacgacatgattggtgatgttaaggacaaaaagtgtatcatcattgatgatttgattgatacaggttcacgtatttcttcatcaactaagtcagttttggcagctggtgctaagaaagtttacgttgccgcaacccacgcacttctttctaagaatgctactggagtacttaatgaattaccaattgagcaaatcgtagttactgataccattaagcacaagcgctacccagacagaatggtcagaatttccgtagaccaattgcttgctcgtggtatcgattatgtatacaatgatcgttcaatccaccaaatctttgacgaacaaaaccgtttaaagtaaaattcttattgataatttgaataaaaaatgatcctcactatgaggattattttttattcaaaaaatcgggtagataagttataaaactatgtctaaatagtaatgattgatataattgatatgtgttgtatagaaagaaaaagagaaagttagaggaatagactatggcacgacggaaaaacatgaagagacggagagttattctaggtaatactttccatctgatcagagaaaatggaatggataatgtttctttgcaaatgattgcagaaaaatcaggcatttcaaaatccttactgcagtcatactatcctcataaggctaagttaactaacgacattatccgcaatctttttaatactttaggtcaacaagttaataattatgacatggctaatagcaatcttccttatgctagaactaaggcatttatttatacgattgctatcttggggatgcacgatgagggcttggaccgtattatttctgaagcttttgttagcaatgctaccctagataattggggaatcatgcttaatgaatggattaaggaaaatcatttatttgatgacattaacgttgacgaaagcgaacttgagacaggaattgcgtttgtaactagtggtattggccgtctatatcatgatcgcaaaaaacaccatttaacggccgaagctcttgctaactatgcaacaagtgcattgatgttcagtttcttgcattgttcttctgaagaaattgatcaagccttaaaagaaggacatgaaattattgaaactgctgatatggaagttgttcaccgagcaattgatacaatgttcgatgaaggcaaggaaattttcagctaaaggggagtcgccatggttgaaggcaaaagagctgatttgcgacgaatgggttatgagcaaaataaccaatataaacgtttgttggctttcgtcatctttttgattgctgcattatcattgattacagctacttttttaaatccaatctttatgaaaaaacagattaggactagctataatagggcagtagttgttcgccaagtgaataaaaattatgatagcctagctgatttgattaatgcagatagtgaagataattcaaacttactatcggatacgcaaactcaaccaattgccgaccatattattgattattctttgggtattcattggtttaaggttactagtttgccactggctaatcagattttaagcgatatcgatcaaggaattgctaaaggctcgtcaagtggggcacaggaagttaaccgtaaactgaaaaagcagggaactaatgcaccttacgcgattattaaagccttcaatttaagtgtgatcactttaggagcaaatattgctggtttattgtttatcgttaatttgataataattattgttaccattattacaatggtttcgctactcaacgatatgaagtcgcgggctacaattcgaatggtgattcatgatacgatggctgctggcatgtgggcaggtttttggctaattttgatttcaggcttgttagcacttgtgccagtaatctttaatgtcgataatatcgaatttggctttttgcttgagattggcagtagcgtctttttggaatatgtaattgctggggtaattatttacatcatttgtgcgataccatggcaaattacagctgctaaataagaatgagaaaacgtaatctgtagaatgattacgttttttgtttgcacaaagaatcatctttctttataattaaaaaataattaacaaatttcatatgtttatattttaaaagaattgggcgagtttatgaaaaaagctaaaattataaagacttttcttgctttcattactatgctttcgactctttttttgtttaatcagcctgttaatgcagccaataaggaggttgagactggctcagtgatgaaaaaaattaagcagtcgaaagaattagtagtgggcacctcagcggattatccgccactggagtttactaccagtgaaaatggcaataccaaatatgtgggggttgatatcgagttggcaaaagatattgccaaggatttacatgcaaagctagttattaaaaacatgagctttgattcacttttggtagcgctagagacaggcaaggtagacatggttatttcggctatgacacctaatcccgagagaaagaagagcgttgatttttctaagatttattacaagccaagtggcgaatatttcttaattaacaaacgcgatcaggccaaatacaaaaaaattaaagattttgctggtaaaactgtcggtgcgcaaactggtagtattcagtattctttgattcaaaagcaaatgaaacagtctaaggttaaaggcttaggcaaaatcaacaacttagttctggcattaaaatctaataagatctctggcattgtcatggaagaaatgactgctaaggcctaccaacaaaacgacaatagcttgatggctgtgagaagtgacttgcgtgaacaacaagctggtaacgcagtagcaattgctaaaggacaaaatgacttagtagctgctgtgaacaagactattaatcgcgttgaacaaaaagatttgattaataagaaatacttgcctgaagcagctaagtatatgaagacagcgcagaagacgaacacgatgactaaatatattccttactttattaagggagttggctataccatcgtgatcacgattttctcagtgttaatcgggatcatcttagggatgctcttagccttaatgcgtttgtccaagaataaattgctgcactggattgcagtttgctatatcgaattcattcgtggtacgccacaaatggtgcaaattttatttgtttactttggtgttggagcattaatttctaacctgtcagctgttgtagcggggattatcgcaattgggttgaactctggtgcttacgttgcagaagacattcgttctggtattgcttcagtagctaaaggacagactgaggcggctagatcattaggtctttctcaagctaaggcttaccgctatgtaattattcctcaagctttgaaaaatatttggccggcactaggaaacgaatttattaccctgctgaaggacagttcattggtttcagttattggggtaactgaattaatgtaccaaacggaattgattcagacttcgacttaccgtggtgttttacctttattcattgccatgattatttactttatcatgacatttactttaactagattgcttaattatttcgaaagacggatgaaacacaatgactaaaatgatcgatatccaacatttgaagaaaactttcggcaaaaatgaggttctgaaagatatttctgcggaagtagataagggccaggttatctgtattatcgggccatctgggtcaggtaagagtactttcttgcgttgcctgaatgtattagagcgtcctacgactggtaaaattgtttttgatggaacagacttggctagtctaaaggatggtaaggaacttgatcaattgcgggaaaagatgggaatggtttttcagaactttaacctttttcctaatatgaatgtaattgaaaatattaagttggcaccgatgaaagtcaagggtgttagtgaagctcaagctgagaagactggactagtcttacttgaaaaggtgggcttggccgatcgtgcaaaacaatttccagctagtttatcaggtggtcaacagcagcgggtggcgatcgctagagccctagcaatggatccggaagtaatgctatttgatgagcctacaagtgctcttgatcctgaaatggttggcgaagttttgaaaacaatgcaagatttagctaattcgggaatgacaatggtgattgtaactcacgaaatgggatttgctagagaagtagccgatgaggtctggtttatggctgatggctatttacaagaaaaaggcacgccacaggaagtgtttgaacaccctactagtgaacgtgcaaaagatttcttatctaaagttttataatcaaaaaggctcaagcattgcttgggccttttaatttactcatctgtaatgatggggtttgataatacgtactgtcttacgaaaaaattttgatgccatcctttttgaattaatgcattaaaaaaggtgttttgattattaggcaaagcagtggctttgggaatgatgacagcacgtaaaatcttgttttgaagtaaaattggtgattgcacatctgtttcgctatttaaattagtggttgcttgattggtcggcgtgttggttgtatcctgctgaacttgataatttgtagtgtcattagtactatcttgcttaaatagcttgaatctgtacttctgcacgcctttaacgtcaacttcatattcatgtcctgcaactaggttagtatttgcgggtgaataagttaggatcgttctaaaattgccgtagccacaggagctgtaattcttaacatgagctgcagtagtaacaactttagtatctaaatcagtgatagtaattgttggcttatttttaatggttctatctgataaatagagcgaccacatgatatttttcccttgaagcaattcaatagggaaaagacgcatgctaggataagcaactaccggctgactagcaggacgaaaagtatcattaatgtttagtactttttgaacggaatagcggtagccatttgtaccataagctgccccaatgcctgtagtggttaaacgacttgaaagtagccaagctcggtgaccggtatctgaaccagttaaattataatggtcagtaattaagtcagtgatcacatccccagcggtttgctgtgaaacattaaagtttaaatttgaagtttcagaagtgtctttagctagcttccaaacaaatttggagatattgcttggcttagtttcactaggtaaaccatgttggttaatgaatgggttagcattaattgcggccattacagcagccgtaatctgcgcgtttttattaagtgtatcagtagtcgagatagcgggcagactgaacaatgatcgatagtaattgatataatctgtttgcgttttaatgtattttggatctaagcgacctaccttaaattttttgcttagatttggctttttagcataaatatttgcggcactataactagttttatcaaggttcgcatattccttttgaaaattatgaacttcgttaacttcttgtgttgtgaatgtcgctgcttgtgtaacttgtccggcgagggggataaataaagttgcggcagcggcaatagaaaatttccgtagaagcattttagactcccttctatggttgtcagtatacctttcattataaactataaccaatgaaaaggctttagtgaaaaatattccactattttgcgcttttctggtattctttgcgtataattaaagattggaacatttaaaagaggtataaaataatgactaaaaaattacaagttggtttgatttttggtggtaattcatcagaatatgaagtatcaattgtttcaggccgcaacatctataaagcaatcgacaaagataagtttgatgtgcacccaatttggatcactaatgaaggctactttgctaatgaagaagaaagcttcaaggttttagatgatccttcataccaagttaagaacccacataaggttaacaacatttctaacttaattgaattagaaaacttgccagaaattgatgttttcttcccaattgttcacggtaacttaggcgaagacggtgttttacaaggtttgttccgcttgatggataagccattcgtcggtgatgacgtcttaggagccgctgtaacaatggataaggaattcactaagatcttggctcaaagagttggtgttccagtcgctgattggatttcaattaagcgttttgaatacgacgacaagaagaatgctaaacttaactatgaaaaggtagcagaaaaattgggccgcgacatgttcgttaagccatctaaccaaggctcatcagttggggttagtcacgtaactaatgctgacgaatatactgcagccttaaaagaagccttcaagtatgacgataaggtcttagttgaagaaactgttcctggcaccgaggttgaaacagctgtcttaggtaacgacaagccaattgtagcaggtgttggtcaaatcaccaatgcaaaaggttcattctacacttatgaaaataagtatgatgataattcaacttctaagttacaaatcccagcagatttaccacaagaaattatcgatactgttagagaaaatgcacgtaaagtttatgcagcaactgaatgtagcggcatggctagaattgactccatgctcaccccaggtggcaaggtagtcttgactgaagttaacgctttaccaggctttactaatatcagtatgtatcctaagttgtttgaagaagcaggtgttccttacagcgaattgattacacgcttaatcgaagcaggtatggaccgttttgatcataagaaaactttgcttcacaagcatgactaaacgccaaaaatatagaggtagatttcaatgacgactaacaagcatgattttgaagaattggctgcaccaaaagcagctgcacaagaattaggaattagtgttgccacgttaagaaagtattctttaatcgtggagaaggtgaccggcaagagcgactattttgctcggactaagcaaaaggctcgtctgtatcatcaaaaagatattgatgacttaaaggcttttcaccgtttatctaaaaatagtggcttaactttgcaagaagccgctcttcaaatctatgctgttagtgaaaagaaacctgaacctgaaactaaagaaccagctcctaagcccgcttataacagtaccgatgtaatggatactgagcaggtggttaagttgcttaacactttgcaaaagacaatttctaatcaaaatgaggcaattaattctttgcagaagcaattgaatgtcattcaaaagcaaaatcaagatttaattgaagcacaaaagcaattagctgcgccacaagatgatttagataagtttgcggctttgccagatatttctggaattgtgagtgcggatgaacctaaaccgaagagtgaagaagaaaagcgcgctgaagttaaaaaagacatgaataagagtcaagaacaaatgcatgacgagattatgtctaaggcaaaggaaaatgccaagaagcgggctacttcaaatgttcaccgtacactagaagatatgcaattaacggaccaaaaggaacactggtggcaaaaaatctttaagttttaaacaaattgattaagaatcaagagctgacctaacaaaaggccagcttttgttttacagtaggcgtataacaattaataggaagtagaagtaatgaaatttaaatggaaaaagcgctatacgatagcagttatcgtggcaattgtaggagcattattgacggtcttgtcctattttgccactgatatttaccacaaggacgacgttgccgtgattaccgatagcaagatcaaggatactttgattgaaaaaagtgaagatgtgtataaaaatgcggatgaaactcgccagcaaattttgcacttaaaagttttatcgggtaagcacaagggcgaaacttacacgactaaaaacgtgtattatccttcgcaattgacgacgcaaaagtatcgtgcaggtcagagaatttttgtcaatatcaagaagggtgatccagcgatcgttaatcctaagcgtgattgggtgttagttttggtagtgacaatcactttagcattgatggtggctgcagtagggaagcactcactctcgctggttgtgtcaatggtaatttcgtggctgatcttttatttgattatcatttgggatgtgcatttgaatggcgcccacattattttgctgtttggcttagctgatatcgtcttttcattctttagcttgctcattgtgcagggcttgaataaaaaaatgttggcgacttggttggcaacgctgctaggagtatttgtttcttttgccttgtgctacgtgatcatgaagttaacgggtgaatcggaaatgaaatatgagaccggtgactatgcaacgcaagatccacgaggcttgtttttagctcagactttgattggaattttaggtgcagtaatggatgaggcgaccgatattatttctagtttgtatgaattaattcaaactaaaaagaatattacgatgagacagttgattcatagtggtcgaacgatggggcaagaaattatgggaccgttgattaatgtcttggtcttaatttttattgctggtgcgctgccagaaactattttgtacttgcgtgataataatactttagcttcaacttttggctttactctgtcgctgggggcaacgcaaagtgtgatttcggcaatcggaattgttctgacggttatttttgcgacaggatgcagtttgttcttcttgaaaaaacgcgattggaagagtttgtttaaaaaagaaggtgagaataaatgagtacattatttgcattgatcgttgtcttagcgattttaatgacaatcgtcggtggtgaaactggaattcgtagtttttttagtgtgctaattaatacgattctattgatcttagtggcgatgctaatatcatggggaattaacattgcaattttgacgctgatttttattcctttaaagctagttacgattatctttttaggcactcatgactatacggtagcaaagaattcattttattcttccttcttagtgtgtttgattattagcctctttattttgggttgtcaatacctggctcaagctgcaggactaggaccagaggcaggagagttattggttggcttgtcgcagatgccgggcttgagttatccgatgattgccgtgacagtggcgattttctcaactttgggtgcaatcgcggaagccgcggtagcaatgagttcgggcttgctagaaatcaagaagcataaccctgctatcggtgaagaagagttgatggcttctggtacggttattggtaatgatgttttgggtacagcaatgaacacgattttatttgggatgttcggtagttttttatcattattcttatggtatttccgcttgcattacacgattggtgaagttttaaatgaaaaactttttgtaaatgaagcgttaattatcatgtattctttgattggggttatattaacagtgccactatcatcatttatgctatcaagaggaatgagcaagaaaggaccaaaacatgagagtagaaaatctgacgctgactaactttaataatcgtgaatatcaagttcatacatatgcgctagagcctaatcctgaattggttgagcaaaagcgcccgctagctattgtagtaccaggtggtagctttaatcacttatccaaaagagaaggcgaacccgtagccttagcatttaacaatcaaggcttcaacagtgtggtgatggaatataacttagtgcaagatccagacaaaatttaccctgatgcggggttagatgttctaagtactgtgaaatatttcagagaccacgctgatgagtatcagttagataaagataagattttaacagttggcttttctgctggcggtcatgtggtcagtgtagctaataacatggctttaaataaaaattatcagacaaagtatgattttgataagactgatgttttacctaataagacaatcttaggctatccgctgattgatattaaaaagattggttttccgattccagaagatcaaaaagcaaaaatgcctgtagaggaagagattttggatagtgcattaggtgttacacgtgaaacgcccgatacatttattttccaggcatgggatgatccggtggttttgatcggaaattcgattgaatatattggtgctttgaataagaataaggattcagcagaagctcatttgtttaaccacggttaccacggcttttcattggctcgtcacaatgtggaaactaaggggcaagattggcaggataatccgcacgcggcgcactggttcaacttggcaatggaatggctaaagagtgagtggggcgaatgatgtgaagcataaaaaatcttctaaccctaatgacaatatctatcacactatcgtcaagaatagaaaaattgaccgaatgattatgccttttgaagcggtgtactgcgtgtggctaatcattacgctggttcttagctttaagctatttgcttattcgattgacgcacaatttgtgctaatttctctattttttcttagcgggtgggtttcgtcattggttaagaatcatcgcatgaagaaaagtagaaaataagataagtaaaaagagttctcgcacgagaactcttttttattagaatcatttactttttatctctaaagaaaataacttccttagcagctacaaatggtccagatgacttgtaaacctttaatctaatagctttggcatcgacatttcttaagccaacaaccttattcttgctatcagacttccaagtcaagtgatcgccgtatggcttaaagttaacgccatcgcttgaaagctcgacactaacttcaacaggatcgccttggtgatcaatctttctaggtacccagcccattcgactcaagtgttccaaatgattaaaggtgaagtttaattcaagtggcttgtcttcgctgaccccatcaatggtttcccattcacttgctaacttcaaatcagtcaagtaatcaattggatgatccttaggactagctagactgctcgtgacatgaatgtcattaattgcatagttcattggatcgggcttggtaattgcgccaaacggatctgaccattctgaaactttgttgccagctacataacgcaaacgcagggtgtagcgggtatttggcactagttcatggaaagtaaatgaattaccatcaatgccatcatgtaaaatgccgttaacttcgatttgaacttggtcggttaattgcggccaaactactgttaatgaatgagagctaatcttgtctggatcaaccattggttgttttggtgaacgcaacagtgaatccgtaatagcgtgaaccaaagtttcattgccatatctgaagtttctgatcgtaatctcaattttagaatcggtaatatcgcgtttagctaacttaatttgtaaagcagtttgtttcttttcttggtattgatcaaattcaggcatccagctgtaatttgtgttaaagaagaagccttccttagcatgggcgaaggtatcaacggtaccgtactcctgcatcgggatttccttgtcgttgattttaacagtcaaaccatcaggataaccgtcacacatgatgttcaagttggtggtgttttccgtttggaaagtattgaaatcgccttgagttgggtcgatggtgatcgtcaatttgcttgcttctaaatcactcgtgatttgtgtagctacatggtttcttgaatagtcgttatagccgttatcatcgtaagtaaccattttactcttgccttgagggtagaggacatagttgcgttcgccgaggtcaaaaatagcgccgcctcgtacaaatactggtaaatgccaggatgggtaagactgcttattataaacgcgtccgcccaagtactttttgccatcaaataagtcaacccacattgttctgtggttaggcaagtaaaggttgtcttttcttgaattgccattaccatcttcgcgaccgttaacaattggcgaaatcaacaagttaggccctaacataaattcatggcccacctgtggggtgtagttgacttgttcatgtggaaattccaagaataatggccgcaagattggctcaccgacttgagcgcggtagattagggtatataagtaagtctgcaattgctcacgtagttttaaataggctcgattaatttgcgtcatcttactattgtaagcaaatggggtcttactaaatttaccttgatcgtctaagttgaacaggattggggtaaatgccttccattcaaaatcacgaatggcaatttgagcattaccaccgccagcggtaccgtcaacggcactaccaactaaaggctggcccgaaaggctagcccccaaaaagccagcaacttgtgttggaatgttttcccagttgccgccaatgtcaccaaaggctagcattgttctattttgactaccagcaataccagtattagagaaaatcaacggccgcttacgcttcaaattgttgcgtaaaattagcgcatcatttttcaatacttttggatcggttgtgtccgtttgaataaaggtggtatcaggtgaagccttcggtgtgttgttttgactccaaagaccagcgctaacgtcatgtatagcggcgtattcactgaagctagccatggcttcttcgttgatttcttgcacatcatagttaggcacgatccaacttaatttaaaatgctgcttctggtagcgatcaaccattgcccgtgctgagaattgatattcttcttcgccattcaaagagcccttgccactagcatcttctggcttgttagttctggtgtaataattaccgtcttcaaacataacagcattacgttccttagctttaccaggctgccataaggtagttaaaaagttgccaacatgacctaatcctagtgcatatttaggtggcatcagcggcttacccgttaacatgtaatactttgccaaaatatttttgggtgaattacctaatagataaaaggtatcaaacatgttggtgtcgtgctttaagatagtggcatccggattgcttttaccaaagtcataattgccagcactctcagtattgcgcaattcaccaaagccggagttagcccagaagaatggcacttgggtcaaaacgccgcctttaccggtaatcttgtcgcgcttgattgaaatgatttcacctttatgactgaagtagccgttctgcatcccgccaccaaagtaaaattcattcttgtgttgcttcaaaatttcggtagtttgatcattgcctaattcaagtggactcagctgaaccaaacgattgcggtgcagcgtctcgtcaaagatgctcattacggctggcttttgttggaaaataagttgataattgccagacttaatgattaaggaatcgctggttgccttaggctgtgatttttcaaaatagtcattgttgaattgagacaggtcaacaaaagatgagtgattctcgtcaaacttcttagctggatcgagaaaatatctgaagatcccgtcagctaaaatataaagacgagcaatatcgccggtggagtagtgaagttcataataatgatcacgtttgttggcaccgataagttggcctagttgatgtctttctatttggttttgtgtcatatttattcttcctatttaaacttgctaccttatattataactaaaaatcaaaaaacttcttaagcaattgtactaaaactggtatttaccaattttgttagatataattaaattaacaattacgatttagacatgtaaagaaagaagatatttatgacttattacattcatgcagataaatttttcttagaaaacagaacagaaaacggcggctatcttgaagttcaagataatggcaagtttggctttttctatccagaaagcaaaaagccagaaggtaagattgtcgattatgctggcaaatgggttgcaccaggattagttgacacccacatccacggctcattgcgtgaggatgtaatgaagagtgactgggaaggcatcaataagatctctaagggcttgcttagtgctggggttacttcatggatgccaacaacgatcactgccgcaagcgataccttaactagaatctgtaagatgtttgcggaccatcaaggtcaagaagaaggtgcaaagattcaagggattcactttgaaggaccattcttcacggaagaacatgctggagctgaaaatcctaagtacatgacggatcccgatattaatgaatttaacaagtggctggacgcttctaatgggatgctgaagaagatttcaatggctcctgaaagaaaaggttccaaagaatttattcgtgaagctgttaaagaaggcatagtagttgttttgggtcactcaagcgctagttttgaagaagcggtcgcaggcgttgaagcaggtgcaaccatgtttactcatacctttaacgggatgcctgatccaagccaccacacgccatcaatttctaatgcggcaatgacgcttaataatgtgaccgatgaattaatctgtgatggccaccatgtgcaaccatgtatggctaagactttgattaatgccgttggtccagaacacattgccttgatcactgattgtatggaagctggcatgatgccagatggcgactacatgttgggtgaattgccagtctatgtaaaagatggcatggctcgtcttaaggacggcgacaatttggctggatctatcttgcaattgaagcaagcagttaagaacgtggttgactggaacatcgttgctccagaaaaggcagtgatgatggccagctatgttcctgctaagagtgcccatatcttggacaattgcggtacaatcgcaccagataaggatgccgacttcttgattttgaacccagatttaaccttaagtgaaacttacttgaatggtgaatcacgttataaggcttaatttgttagtctagttttaaatagtcctcattagattgagggctattttttgaccctaaattttggcaaatagtatacaattaataatagtaaagtaggtattatacattaggagaaatttattatgccagatggaatcagtcaattagagactgtaaaatagtttgtgtaaggatgaatgattccttaaatttatttctttaaacattagaaaaaggagttcctttctcgtacaatgtcattaagttaaggcattgacttttttacctaaaattaacttgattagtgggcgtttatttactttgaaagtctatcctaaaacttgataggagggattaatttgagcgaagagaatcaaaagaagctgtttggcatctcagcgattatttgcattattttattaacgattacctattttggtgatttagccatcagcaataccttaattaattatcacagctgggtagggacgttttgtcagacttttggcgagtttccggtttatcttatttttgccttatgtggacagattacgatgacttatgcctggaaaggcgactgtgaaaagctgctgggggaaggaccgttgtttgttggcgggcttgcactgtcgctttggcagagcaagaagtatgtcaatgaattcttgggctatctgtattcggtacaaactaaccttaaaaacggtaaggcgatagcaatggccaacagcgactcagtaaagggcggttatgcaggctcaatgattataatggtctggctgttgtttttcgttatatttacgctgttggtacaatggtggctgaaaaacaaaacgactaaacagctgactcgctatatgaaaattgcgattttggcgtcattgacggtttggtttgcattggaagttaatctgaccttaaaagacctgtggggacgctatcgcccatatgaactcacgatcggtaatcatgaatttaccaattggctgacgatcaatggcgttaatgggcataagtcattcccatccgggcatgcgatggcggcaacgttatgcatcgttttttcatggttcgtttccaacaataagcgtaagatctttttcattggtggcatcgtttatggtgtcgtgatcgctataagtcgagtaatcgtgggcgcacatttcctttcggacgttacgttctcgtttttcctgaccgtactgatcatctttatcatgaatggtcttggtaaaaagctaattgaagatttttaaaaattagggctgtgaccatcgaaaggtgaccacagcttttatttatgtgttaaaagtcatgagaatacgccacctttgataaaatttctaatcaaagatagcgtaaagcggtttcaaaaattaagcaaaaaacactcatcaaattctgatgagtgttctaagacgttctccgttcagagtcaatgtcttaacttaatgacattgctttctcgtatgattggtttgaacaaaaaaacacatacagaaagaagaactccttcatgaatgattttaccaaagattttgctcaagctctattcaatccagacaaaataaatgatttattgcgcaaagagctacaacaggctgttaataacttgttagaagctgaattgaccgcctttctgggctatgatccctatgccagaaatggctggaatactggcaactctagaaatggtgcttatttccgcaaagttgatacgcaatttggcccaattgaagtgcaagtgcctcgggatcgcaacggtcaatttcatcagcacacgctgcctgactacaagcagcactcggatatcttggaaagcatgattatcaagctttactccaatggcgtgaccaccagggaaatagccgatctaattgaaaagatgtatggcagccattacagtccagctcaggtatcaaatatttccaagcagatgattccaaaggttgaggcttaccacaaacgcaagctaagcgacaagtttttctgcgtctatttggatgcgacataccttcctttgcgccgagaaacgtttgagcgttgagcgtgaagcagtctatattgccattggcattaaacctaatggacataaggaagtcattgactactgcattgcacctagcgagaacattgaagtctggacagagatgcttcaaaacatgaagtccagaggcttgaagcaagttgaactctttctttctgatggtgttgttggcatgaaaacagccttggccaggacttatcctaaagctcattttcaacgctgtttggttcatgtcatgcgcaatatctgcgctaaagtacgcgtcgacgatcgtgaaaagatcatgaacgaattcaaacaggtgcatcaacagacaaacaaagaagaagccacagctgtcctgcatgacttctataccaaatggggcaaggtttacagccatgttatcagaagcttgaaagacatagaaccagatctgctggtcttttataactatcccaagcagatcagagcttcaatttattcgactaacatgattgaatcatttaacaatgtgatcaagcgcaaagctaagcctaaggcagagtttccaactgaacagtcgcttgatgcttttattggtattcaggcaatgagctacaatgaccgttatttcaatcgaattcataaaggctttggtcaggttcaggacaccttagaatcctactttgattaaataaataattaaaaaatcaatttacgagaaagaactatttacacaaaagatttgacagtttcgtcaattactagtactttttatgtaataactttcaattaattgaataatttgtactcttattgattaaagaaaagtatcacatatgtttcatgaatctcgtctagccaagtaggtgagattttttattatgtttctatgtaatcgctttcaatttagaaaaaatatgctatattatgagtgtaaagaaattaagaaataaaaatattaaataagtttaagtaaaaggagacaggtgagttccgatgggcacttgagagtagaaagtcagatatatagaaaggtttgtgataccaatgggcatcgtaaattgaaaacaaaatgtagttcaataatcatcaagtgatattaatgtacataagaggccgtgaaattattagtaggcatagaataataactagttgatgaatcacttggattaggattaagaaagactttcatacatgataaatattaataagaaatgacctttcgctgaaatgaagtatgcgaagggtcatttaattttggcttaaattttttatccgatgtaatcacatctgtttactacattacgatgtactatattgcaatgtagtaaattacgatttagtaagttataatttagtaaagtataatttagaagatggtgaccaaatgtttattggacgaaagaaagaacttacaaaattagagaaaatgtatcaagctgataaatttcaatttgcagcgatctatggtcgtagacaaattggaaaaacagcattaattaacgaatttgttagaaataagccaactatttactttaccgggctagaagaaaatgaattctataatcttgaacgcttttcttctgcaatcgaacattttaaagatccagatagtctgagcagtgtaaactatggtaattttgaaaattgttttcgagaaattgctcgattggctcaaaaagaaagaatagtattagttattgatgaatatccatacttagctaatgcagtccatgcaattagttcaatgctacagtcttatattgatcatgaatttaaacaaacaaatttatttctgattctatgtggttcttcaatgtcatttatggaagagcaggttttgtcttataagagtcctttgtatggcagaagaactgctcagtttaaattacagccatttacgttacatgagacacaagaatatttcccacacatggataaagaagaggcctttattctaaatacgattactggtggcgttccattatatttgtcatatatgtcagaagacaaagatgtttgggaaaatattgaagaaaactttatggacgtaaacgcgccactttttcaagaacctaataatttattgaagcaagaattgcgtgatccagccaattataattcaattattaatgcaattgcaggcggggcatctaggattaatgatattgcaactaaggctcatttatcgacgccgttggttactagcaacgttactaatttaattgagttaggcattattgagcgcaaagtgccggtaactgatcaggctaagcctaaatcacgtaaaacaatctatcaaattgcagatggcttgtttagattctggtatacatatttgggtaaatatatgagttccattgatcgaggacaaacttcattggtaatgaaagtaatcaaacaagatttacacaatttcatgggaccggaattcgaaaaattggctcaaaattacatgtgggatcatgatgaggatgatgaagttatccctatgccgtttatttatctaggtaattggtggggcaatgatccgcaagagaaaaagcaagtcgaattagatgtagtggggctgactgcagataatctagttggatatttcggtgaatgtaagtggaaaaacgagcctatacctagaagtgtcttggaaaaattaattaatttgagtaatttgattagcgtggctaaaaggcattactatttgttttcaaagtcaggctttacggattcatgtacggagctggcagaacaagtggggtgcaagttgattagttttgatgaaatgtaatatcatttttcctattatttttatctgttgtgatcggagtaagtactggtgtttaaaaaaggcgataatgtggtgttaattctaaagcctaatggcaatcttgaaatgaaaaaagaaaaaactaattttggggacgaagtatcaaaaatgtctgctaaagaaaaaagattgcagattgaagatttgggatatgatccattagaacaaagatcaaaaggtagagaaagaattgaggattaaaagttagaaaaggttcttggaatcttttttgatgaatttaggtaatctaaacaaagaaacggcaccgctagataattagcgatgccgttttagttaggtttagcaataatcaactaagacataataaacatactaacctagcttaggtagctatattattatgcctgcttaatttttttaataaactgcgccgtcgtagaagttgtaacgagggcggttgaagtcgaagtcttttaattcactgatcttaattgcgttatcgcaaacaccccagctcattaagttgattggcttaccataatcttcatcaggaattaccaacaagatgtacttgccttttgaaagggcatagccaagttccattcccagaccaacatcttcttcttcaggcaagtaaacgccaagcatgatgtcgctggacttaatccctactaagtcgttatggtaggtagctgatgcccattcaatgtcgtgcaagtattcaggatgttcatcaacgcggatacccttatattgattatcaagtggtacatagctgttttctaagtcaacggtaggattttgctttagagcttccattgcttctttgtaagccttattttgcttttcgttgaaccaaccggcaccaaagtataaagtttttgtctttgccatattttttctccctttaaaaatgatttaccttaactttaccatcttttgggttgaaaaaaacgtcttgttaacttatggtgaaaatgttaattccacattaggaaggaaaaatccaatgactaatcaaaatctttttgcaccggatgcagtatttatttctaatcaaactaagcaagatttggtttttaaagaagtttacgagcatttacgcgaaagtggctatgttaagggaaactttttacaccatattgtcgaaagagagcataattttccaacgggattggatactgcaacactaggtaaaaatattcctaatattgcgattccgcacaccgagggcgagtttgttaacacgagactgattgttccggttgcgctgaaaacgccagtcacttttcataatatgattaatcctagccaagcaattgaagttaaatttttattcatgcttttagataatgacccagatgggcaagctgcattattagctcaagtgatggattttttggctaatacgccagccaacgaattgcgcgaagtttttaattttactgatcctagcgcgatttatgcctttttagagcaaaaatttagcaagaaaaaagaagactagtttttagccttttttgaaactaagtacgttataatatttttaggacaaagaagaacatagacgtgcatgtagcaggatagctacctgctcaagataggcgcgcgtgtgggctctggcaacagagctcttttttatgcctttttagagcaaaaattcggtaagaaaaaagaagactagtttttagccttctttttctaatcttcaagataaatattacgcaacttcatgatgtctgcacttgagagcttcattacatcgcgtaggtagttattaataccgccatattcatcgtttagtactttaacagcatggtcaaggtattcactgcggacactctgaatgtcacgaatcgattgcagcacattttcatttttaccattttgacgggcatgttcaatcatactgtcgacgaaatccttggtagtgatgttggttaaaagatagtctttcttaatcgtatttagtggtacgccaagagcagataatgcaagtaatgcaccgaagccggttctatccttgcctgcagtacagtggaaaataacactttcgccatccaccgtattttcaagcaagacatcgaaaaacttgcgatatgccttttgtgcaggttcactttcgatcatgtcttcgtaagcataatgcatgtgattgaagccaaaatcagcgtcgtcgtgtgcttgtgtatctaagtcagtgatactcttggatgaattggttaagtcctcactgaagacgggatcatagatatattcaacaccatctggcacgcgatcgggttgattatcaacttcttctttacttctgaagtccacgtcatatttaacgccgtaatcagttaaaaactgcttatcaaatggtgaaagatcagctaagttaccggttctgagcaacttgtgcatcttgatttttttaccggataaagtttcataacctccaagttcacggaagttgcgtccactagttacgccgattaattgattagttaattttttagtcaaaaaaattctcccctttctgttaatgaatgtcatgaatattattttagcaacaaatcttcaagcaaacaatcaattaaaaagtaacggctttcaaaattatgctaaaataaagagtaagtactagtgcaatttataggagatgaattaacgtgacagataaaagaaaagaaagcattttagttccagttgatggctcagaatcagctgaaagagcctttgacaaggctgtaaaagttggtttgcgtgatggtgctcatgttgatgtattgaacgtaatcgatacgcgtcaatttatgggtgaaatgcaagacactttgatttcaggagataccatttaccaaatgactcaagattctgaagaatacttgaagagtttgaagaaatgggctcacgataacttcggttttgacgatgttgattatcacattcgttatggcagtcctaagcggattatttcttacgacttcattaaggaccaccataacaatttgatcgtaatgggtgcaactggtttgaatgccgttgaaagaatgcttatgggttcagttactgaatatgttaaccaacatgcgttggctgatgttttgattgttaagacagatatggctaacaacccagtaaaaccaacgatgaagaagaactaattcctataagaatggacgttagatgtgaatatactcatttaacgtttttttttataaaaattagtcaaaaagcttgatagaatacgaatgcttttggtatcattttataaaatgaacgtggaatgactgaaggagagtgggataaattgcttgcacaagctaaaagaattgaaaacgtttttcttactgtggcaaagtcttcctcccgtgaagatgttttttctgttcgtttatttgataataacgttcttaaaaaggcttaattattggtcgtctttgagcgactcgtaattaagccttttttagcgtcaagtttgtttttgtttattttgtgttttatggaggaatcaatgaaaagatttcgtaaaatcttggtagccgttgtggcaatacttgttgcagttgttgcaactgcatgttcaagtaagagcagtagttcaaaggaaaactacactcctaagtcattaactattcaatttgtaccaagtcaagctgcaactaagttgcaagctcgtgctaagcctcttgaaaagatgctttcaaagagattaggtattcctgttcacgtttcaatgtcaactgactacaacactgttgtagaagctatgaagtcaaagaaggttgatgttggttttcttccaccagatggttatgtattggctcacaagcaaggcgctgctgatttgcttttgcaagctgaacgttggggcgttaaacaaccaggcggtaaggcaactaaggatttagttaagaactatcgtgccgaaatccttgttaagaagggttcaaagattaagtcatggaaggacttgaagggtaagtcaatctcagttcaaaacccaacttcatctgcaggttacgttttcccagttgctgaacttaaggaaaagggcttggatgtaaccaaggactctaagttagttactgtaactggtcatgaccaagctgttttgaacgtattgaacggtgacaccgatgcagcatttgtctttgaagatgcacgtaacactgttttgaaggacaacccaaagattatgagtcaagttgttccaatttacttcactaagccaattccaaacgatactatttcagtaattccaagcatgtctaagtcattccgcaagaagcttgctaaggcatttatcgctgttggtaagtctaaggaaggccgtaaggttattgaaagtgtctacagccacgaaggctatgattacgctaaggacagtgacttcaacattgttcgtaagtatgacaagatggttgaatccactaagaaataataattcaaattaagggagctgcgattaaatggcagataagccaatgatccaattaaaagatgtttctaagatctatgacaatgggactgtcggtttaaaggacatcaatttaacaattaataagggcgaattcgttgtagtagttggtctatcaggtgcaggtaaatcaactctgcttcgctccatcaatcgtttacacaatatcagttcgggcgatattgtgattgacggcaagtcaattactcaggcaaaaggtaagaacttgcgtaacttgcgccgtgatatcggaatgattttccagagctttaacttagttaagcgttccagcgttttacgtaatgtattagttggccgcgttgcttattacccaacttggaagaccacgtttaatttatttagcaaagaagataaacaaaaggcctatgaggcattgcaaaaagttgacttggctgacaaggtttatgctcgtgccgatgagttatctggtggtcaacaacaacgtgttgcgattgctcgtgttttgatgcaaaatcctaaaattattttggccgatgaaccaactgcatcacttgatccacaaacatcagtcagagtcatgaatgacttaaagatgttgaacgaaaaatacggcatgactgttgttgccaacttgcacagtatcgaattggctcaacaatttggtgaacgtgtaattggtattcgcgctggtcaagttgtttatgatggtaagatgaaggatactcctaagtctgtcttcactgatatttataatggtggcgacggcagcgaggaggcagaataatgcctaaaacaaaagatgcaatgaatttggtttggaccatcatcatggtcgctggcttgttcatttcaattgatgtaaccaatacgcacatttctgttttattccaaaactgggatcaatttgcggatatttttgtgcaaatgtctcacccagattggggctatatgagtgttatttggcctaagttgattgaaacgattaaaatggctgttttgggaaccgtcattgggtcagtaatcgcatttatttattcattattaattgcacgtaatattgttaaaaacaaggcagtgactggtgtgcttcgttttatcatgaacatcatcagaactattcctgacttgcttttgggtgcgattttcgtagctattgttggtatcggtcctgttgccggtgtcatggctttggcagttttcacctttggtgtggttgttaagctattctacgaagcaattgaaactattgatccaggtccaattgaagctttaactgcagtaggtgctaataaattacaaattattcaccaagcagttttgccacaaatcatgacttacttcatttcatatgttttatatgcattcgaaatcaatgtcagagcatcaacagtccttggttatatcggtgccggtggtattggtttgaacttgcaacagactttgcaggtcttcaactatgctcaaactggtacgatcatcatcgttattatcgtagttgttgtcttaatcgactatgtttcatctaagtcacgggaggcgttaatgagataatggatactactatgaaaaaattacctgctaaacccgttgaccgtaagaagcaagtagtgcattggctgattgcgattgtgacaatcatcattattgtttggtcattcactggcattaactttggtgggatcaaggcaactgctggccagattgcaggagcgattttctcagggattttccatccggattggaaatacgtttacaatggctctggtgaagatctgatctcgcaattatggcaaactatttgtatcgcattcttaggtacatttatttctgcaattatttcattgccatttgccttttgggcagcacacactaagcataagcactggtacacttcaagaattggtaaaattgttttggcaattatccgttctttcccagaaattgttttagccttgatgttcattaaagctgtgggtccaggctctgcagccggtgttttggcattgggtttccactcggtggggatgcttgccaagctgttttcagaggcaattgaaaacttggatgacggaccaaatgaagctgttgttgcagccggtggttctaagtttcatgtggtcatgttctcaactttgcctaacttgatgccagcacttatttcaaatacgctttatcgttttgatgtttccattcgttccgcatctatccttggtttggtaggtgccggtggtatcggttatccattgattattgctttgcaatatcgtcaatgggaccgtgttggtatcattttgctagggatcatcattatggtggtgatcatcgactggatttctggttggatcagaaagaagttagtctaattcccaaaatttgaatattaaagaaagcgaagacgaaaagtccccgcttttttgttagccgtgaaatttaaattggcattgattaagatgatcattaattaatccgattccctgcaagtaggaataaatgactacaggtcccacaaaggaaaaaccatcttttttcatttgtttggatatcttctgcgataggtcattagaagcgggaacgtcatcaaagctggcaatatcatgcacaattggagtaggtacaaaattttgtaaatatttggcgactgaacaatatttttgttcaattgccaaaaatgcccgagcatttttaacagcagcattaattttcattcgattacggataatgcccttgttttgcattaatgactcgatatctttatcggtcatctttgcgacttcagagatctgccaatttttgaatgcagctttaaaattgtcgcgtttatgcaaaactgtggaccagcttaaacctgattggaaaagttcgagcacaagcatttcatacaaatgtgactcatctagattaagtttgcaccattcatgatcgtgatactcctgtactgcttcgtcttttgtatcgccccatggacagcgaataatttcttgattcatatttttctctctttctatgtaagtaatgttttacccctctattatttattacgcaaaaaaatgcgattattttttgagaaattatatttttatgtgcgaaataagggttttaacagctttttttgctataattaggtgtgaatttcgaggaggatcctatggaaaaattagataccatgatgttggctgatgatttagccttatcacaagataaaattttaaatggcgaacaagactttggcgctgaagctgtttacaaagtaatcgataacttgggcgttttaaataacccaatcaaggattacttcgacatgactgaagaacaatattatgaagctgaaagcgatcacaaactaactttgatcaagatggacagtaagttgactgatttgcatgatcgcattttaactaaccatgttgatggttttgttgataaggacgagatcaacttaacctacaatcatgagaatccatatgaagatgatttatacgatccaactactgattatcgtgaaattgtttacagcttgaaagttattggtgcggttcaagcaattgcagctaaggacttgcaagaagtattgtctaaagatgctgtattatcaattggacttgccgcatatgctttagcacacaacgcataaattatttgagtcggctggtaagcggccggctttttttgcttttttgaggcgaaaagatgaatttgtttaaacacacaaagggaatagttgatcgaatcgttggcgccaaaaaacgctctgcaatggataaagatagtgaattgcttgatccgatgcaaaaatatactactgttggagaatatcatgttggtgccgttgatggtactccacatggtaaggactatgttttaaccgtttatcaagacgaagacggcgtgttgcgacaagcacttagtccagagactacaacgaaattagcaccggaatatttacgcaagtataatgcgaaactaggtcattttcgtgcctttcataataagaagacagggcgccgttattgggtggaaaattacttggataatttcactacggaagtgaaaaagcatattcgcccaggcactaattcggtcaatatcggtgtaattacagatactcactttaaagataaagatagcagcgatttttatggctttaatgggctgcaacatgtgcaagaattttcttatttagatcaatctggcttgctagatttaaaagtccacttaggtgactggatcgatggctccgatgctggcctggtcagtgaaagtgaattggtcaagctgaacaagtcttttaagtcggatcaggtgccatatttgagtatcaagggtaatcatgatgaaaatgataagtttgatgaacatcatgatttaaaagcctcatttccagaaaatgaattcgaaaatattatgtggcccgatatgtaccgacaacgaggaattcattatgtttcgcgccagcacggggtggcatactttgatttagatgacgtgcgggtgatttcagttaatacgtcagatgttccatatgaattaaataaccgcgggcaaaagcgctatgacaataagattgtattggctgtgcgtgaagatcaaattgaggaaattatcgaaattttggctaattcttccaacaaaaagatcatcttcatgtcccatgccaacccgattaatcgaaaggggtctaatgcacttaagtataatggccgctctttgcacgaactgctagttgcttttaatcaacgtgaaaaaggtcgaatgcacgctagcaatggtgttccagcagaatttcgtttatcaaatagttttgattttaccaatatcaagaatgcgagaattattgcctacttctgtggacatcggcatcgtgaataccagtatcggatcaacgggattcaatatattttgtttaactgttctgccttgatggggccaaatcattccctaacaactaaatacaacaaaaacttagaccgaagaattgatcaaaataatgaatttgcgggttatattgtgaacgtcgatttaaaacgacaccgcattcaatcctttggctatggtgcagcttctagacgccgggtgtatttcatttagttaaggaatagtaaaggtatttggctattacaagtgtttagcttataataaaaaagttaaagtaaaaaaattataagtgtaagtatttttatatatagataaagtagagagaaattagcttaggggaagttgaaatatgtgcggaattgtcgcattttatgatccaaaaataaacgaaaaacaagccgttattggtaagatgatggctactatcaagcaccgtggacctaattccgacggttattacactaatgatgaggttgcccttggtttcagaagattgtcaattatcgatcttcgtgggggagctcaacctatttataatgaagataaaactagagcaattatctttaatggtgaaatttacaactttaaaccattaagagaacaattaattaaagcaggccacactttcactaccaaggccgatactgaagtattgcttcacggttatgaagagtggggcatggatggccttcttaagaaggtacgtggtatgtttgccttccttatttgggatgacaacaacaagaccctttatggtgcacgtgacttctttggtattaagccaatgtactacagcaaccaagatggccacttacttgtaggttcagaacttaagagtttcttggaatatccaaagttcaagcgtgaattgaacgttgaagctgttaagccatacctcatgaaccaatacaacgaccttgaagaaaccttctttaaaggcgtttacagattcccagcaggtcactggttcgaatacaaagatggtgaaatgaagacccaccaatactgggatgcggaatacaaggaaaatagtttaagctttgaagaaactttgaagcgtatcaacgatgacttgaaggaaaccgttgatttgtacagaattgctgacgttaaggttggtgcattcttgtcagaaggtattgactcttcatacttgactactttgcttaacccagacgatgttttctcagtaagttttgatgactcaacttacgatgaagcttcaaaggctaaggcattagctgacatcaaccactggaagttctacagtgacaaggttgatgccgacgaagctatgcgtgattttccagaaatgcaataccacatggatgaaccagatgccaacccatcaatcatcccactttggtacttgtgtaagttagctcgtaagcacgttactgttgcactttctggtgaaggtgccgacgaattatttgctggctacgttaactacgggatgcatacgcataacgacattattaaggtctttacttcagaattgaaaaagttgcctgagaagaagcgggttaaattggcacacaagattaagagaatgcctaatttcccaggtaaagttcacatgtacaccaatttagctgaaccgagtgaattttatgtcggtcaatcggttatctatgacatggattacccaactatctttacttctaaagatgctaatagcattttacagccaacgtatcgcaataaattgactgttaacggcatttaccaaaaagactttaagaaagtaaagggagtcgataatgttaagcagatgcaatacattgacttgcaccactttatgcttaacgatattgaacaaaaagctgataagatttcgatggcccattcacttgaagttcgtgttccttacctcgacaagaagattgcggaattggctaactctatcccaaccaagtactcggttaaccgtcatgataccaagtatgctttgcgtaaggcttcagaaaaagttttaccagatgagtgggctaagagacctaagcttggcttcccaactccaattaagcaatggttgaaggaaccacgtttttacaaacaagttcatgctatttttgaagaagaatttgtcaacgatatttttgaccaaaagaagattatcaagttacttgacgacaactatgaaggtgatggctcacatagacgtcaaatctgggctatctacaccttccttgtttggtacaagttgttctttgttgattacgaaaacacagttaagaaatatcaacacgtgcaacctgaagttgctaagctaatttcacagggcaaattactataattctagggagattttttgaggatgagtaaaaaatttacgccgatcttactcggtagtgatatcaacgtgtatggtatggcacgttcatttaatgaagcatatggcattaaagtgaaggccttagctgacgttcaacttgctgctactcgttattcaagcattgtggacgttgaattgcatcatggctttagtagtgatcctacttttatggacgtgatgcacaaaaagatggaagaatacaagaatcacgaggagccagttatcttgattgcttgtggtgatggctatgctgagttgctttctaagcaccaagatgaattgaaaaaggtctttatcgttccttacataaaatatgacttacttgaaaagttaatctctaaggaaggcttttatgaaattgcggaagaatatggcttgccttatcctaagactaagatcattacgatggatgactacaagtcaggtaagtacgaggatgtcccatttgatttcccagtggaattaaagccggaagatccagtttcatggttgaagtgtcaatttgaaggtcggaagaagacttttgccattcaagataaggctgaatttaaggatatcgtaactaagatttatactcatggctacaacgctgaccttattttgcaagactttattcctggtgatgattctaacatgcggaccttgaatgcttatgttgataagaaccaccaagtaaaaatgatgtgtttagggcacccattattggaagacccaactccacaatcaattggtaattacatggcgattttgcccgagtacaatgaaaaattgtacgaagaagtacaacaattccttgaaaagttgaactacactggtatggccaactttgatatcaaatatgatccacgtgatggtgaattcaagttcttcgaaatcaacttacgtcagggacgttctagcttctacgtaactttgaacggttacaacttggctaaatggtacattgatgattatgttgaagatgccttgaaagataaggaaacagtttatggtaataagcttgaatctaaatacaagctttggttaggcgtgcctaagaagatcttcaataattatgcttatgacaacgactataagacgactgctgacgaacttattcgtgagggccgctatggtactactgtcttttatgacaaggatagaaacttcaagcgctggttattgatgaagtacatgttccataactacttcaaacgttacaagacttactatgaagttaataagggtaagatctttgacgaagaaaataaaaaattaaacaaatagtttaaattgagaggtaaaaaatgcctctctttttttctaaaaaattttagctgaatcatttcccaatttaatggtcttttggttaatacaagatatattcatctatatttgaacacaatacaagatgttgtgttttatgctatgataaagacacgatatttggagtgattgaaatgctaaaagaagaatttaaccaacaaaatgtaacaaaatttaatacgcctaaaacttttgttaaacgtgatgggtcaaagtatccgttcgcaatttttaaactcaacatggttttgcataacctagatttagataatgtagcacctgctgtaattgaaaaaattgtggctaaactagatgctgctgatgaagtaaatgcacaagatgtagcagttgcttttagagatagcctaaatgagttgggttatttggatgaagctaaagcttatgtgcaataccgcaagcacgatgaagaggaatggattaaacaaaccgatactcgtgcacggttaaagcgaatggttaatggtgacccaacgattgttaacgagaatgccaacaaagatagtgaggtcttcagtactcaacgtgatttaactgccgggaccgttggtaaaacagttggtttgaccatgatgcctgagcacattgctaaagcccacttgcgcggtgatattcactggcatgacttggattacacaccactttcaccaatgactaactgctgtttgattgactttaaggatatgctaactaatggcttcaagattggaaatgcctatatgactagtcctaactcaatcaatgtggctacacatcaagttacgcaaattattactaatgtagcttctagtcaatatggtggctgttcttttgatcgagctgatgaagtgttagctccttttgcagagaaaaactaccaaaagcatttaaaggatgctggcaagttcattgatgatcctgaaaagctggaagaatatgctaagagtcaaactaagaaggacatttacgatgccatgcaaggcttggaatatgagattaataccatgttctctagccaagggcaaacgccatttactactttaggttttggtttaggtacttcttggattgaaaaagaaattcaaaaagatatcttgcgtatcagaattaaaggattgggtagagaacgcagaaccgcaattttccctaaattagttttcaccattaagaagggcttgaacttacatccaggggaccctaactacgatgttaaacaactggctattcaatgttcaactaagcggatgtatccagacgttttaatgtatgatacgatcaagaaaattacaggttctttcaaggctccaatgggctgtcgttcattcttacaaggctggaaggatgaaaatggtaaggaagttaactcgggcagaatgaacttgggtgttgtaactgttaacttgccaagaattgccatggagagtcatggcgataagaagttattctgggaaatcttcaatactagaatgcggacttgccaccaagctttagcctttaagggtagacgtgcaattcaagctaagcccgaaaatgcgccaattatgtatcaatatggcgtctttggtaaacgacttaagccaggtgatgatgttaacgagcttttcaaaaatggtcgagctacgatttcgttaggctacatcggtttgtacgaagtagggacagtcttttatggtcctgattgggaacacaatgaagaagcacatgattttacaattgagatcgtgaagaaaatgcatgacttgtgtgctaagtgggaaaaagaggacccatatcattggcattacagtttgtactcaactcctagtgaaagtctaactgatcgcttctgccggctcgatacggcaaagtttggcaaggtgaaggacatcactgataaggaatactacactaattcgttccactatgatgttcgtaagcacccaaccccatttgaaaagttgacttttgaagcaccatatccatattatgctgcaggtggttttatccattattgtgagtaccctaacttgaagcaaaatccagcagcccttgaggcagtttgggattgggcttatgacaaggtaggctatctaggaactaatacgccaattgataaatgttataagtgcggttttgctggtgaattcaagtctactgccaagggttttgaatgtcctaagtgtggtaatcatgatcctgctacttgtgattgtgtcaagcgaacttgtggctacttgggcaacccattgaagcggccaatggttcacggtcgtcatgaagaaatcgtgcaccgggttaagcatatggactttggcatggaagatagtttagctaccgaagaagaagtaaaaaacggtgagtactaatgcctgaaaaagataaaaacactcaagaaggaccagatatccggagtaatttgatcaaggttaatatgggtggggataccatgtttgtggatcctgaccaatataagccacagttagatcaccaacgtgagttaaaaagaatgcaccgcaagccgaaaaatccaaaaccacaagagtggaagactgaggattattctaaacataaaattgcggattataagccatttaactttgttgatggtgaaggcgttagatgtagtctttatgtttcaggctgtttgttcgattgccctggttgctataatttagcagcccaaaactttaattatggttttccatatacgcaagaattggaagaccgcattattaaagacttgggccagccatacgtgcagggattaaccttactaggtggagagccattcttgaatacttgggtttgtttaagaattattaaccgaattcgaaaagaatttggccacagtaaggacatctggtcctggtctggatatacttgggatgaattgcaaaaagaaacacctgataaaaaggaaatgttgtctaagatagatattctagttgatggccgctttatgaatgatttaaaggatttaaccctgcaattcagaggttctagtaaccaacgaattattgatgtgccaaagtcgatgaaggcaggcaaggttgtcatctgggataaattgcaaaaataagataaactaaagtccggaatgattttctggacttttttgctaggtgaaaaaatggaagaaaaaaatattaaacaagttgatcaaatcatgacggccttgacccaagtgattgatccagaattacaagttgatgtagtaaatcttggtctgatttatggcatcgatatcgaaggagataaggcaaccattaagatgactttgacaattatgggttgccctttatctgattatttggaacgacatattcaaaaagctgttctttcagttgctggaattaagtcttgtgacattaagttggtctggtatcccgtctggacgacagagcgtctttctagtgcagctaaaaagcaattaggtgtaactaaccatgatgatcaaattaagcaggagaaagccaccaaagagaagattatcgacttttcagtaccgatcaagaaaatggcagatgaataccctgactttgttcaaattatgtacgattgtggttttactagaattaaaattcctggattgcttaaaacggtggggcgtgtgatgaccattccattgggagcccaggcaatgaaacttgatttggctaaagtgaaaaaagcatttgaagataaaggatacaaggtaatcaatgactgataaaaaaagacaggatgcaatcctgaaaattttgcattatattcaaaacggcggcgattttgcgaccgcgaagaagatgtttcaagaagaattcgatcaggttgatgtggccgaaatcacagcggcagagcgcgaattaatcaagcaggggttaaacccagcagagattcaatacctgtgtaatgtgcatgccgatgtctttaagggtaatatcaaggagaatgcggtaaatcctgattttgctactccggggcacccggtgcatacgattaagctggaaaatatggtactgaaatcattggttaatgacgcactcttgccagatttgaaaaagtatcaagcaggtcaagatacactggataaaatcagaaaagaattgagtgatttggcaacaatcgataagcattaccgacgtaaggagacctcgctttttccattaatgaataaatatggcattacagctccgcccgaagtgatgtggggcgttgatgatgatattcgcgatttaattggggatgcaagcaagattgctggtgaggagcatccagataaagatcagttggctgaggcaattaaaaaggcgagtcatgaagtgcttgagatgatctttaaagaggagagcattatgattccgatgattgacgaggtagctgatcaagatgattggtacaacgttaaacgcgaagagagtcagattggctataccctgattcgcaagccaatgaattggaagccaaaggaagctaaaaaagaagcagggcctatttctgttagcaatctttcatccttcctcattaattttgaagaaggaaggttaaatttagagcagttaaatgcaattttggatatgttgccatttgcattgacctttattgatgaacacgataaggtagcttattttggcggcggtgctgagatttatccgcactcgcgcaatgctattggcaatgacgtattctcgtgtcatactgctaaaagtagaccgttaattaaaaagatttttgcgcaatttcattcaggtgaagttgacaagtatgagtttcactttactccacacaagatgaagcgctgcttatacctacgctattatgcagtacgtgataaaaatggaaagtatctgggttgtcttgaggtagcacaagatgtgacagaaattagaagctggactgaagaaaagaaaaaaatttaacttgttgggctgtgttctagtaagggatgcagctttttcttttgccctcgtgcaaaaaatcacaattcttgctagactagattgagagaatgattaaaaagaagggaagagagaaaatgcgcacagcacatggaaaacaaccagctgatgaaatcaaattgcattggcttcttctaggccaattactaacgtggttgggttccagctttatttggccattgacttcagtttacctgcacgaccatcttggcgtttcactagctttagtgggtgtcgttttactgttcaactgtgttgcaaatatgattgggtcatttatttcaggctggtgctatgaccatatggatccatatgtcttgctgattgtgggggctgctttagatgcggctgtcttgtttggcatggctttgaatcatagttggccgttatattggctctggatgactttaactggctttttgggtggctggaatggagcattgattaactcgattgctactagtattaaatctaagccaggtcgttatgtcttcaatatgatctactttgctcaaaatgttggggtcgtttgtgggacattagcagtaggttatctttatgattattcagtgactttattatttgtcattgctggtcttttgttcgttggcgtttgcgttaacgcaattattaattatcggccaatgattcagttccacaaggagcgtttggctaacaaaggcgaatcaaagaagaaggcctttgagccgatgccaaaatacaatctgattatgtcaattggcttttttgttacgatcgctgtaatttggttgatgtacatgaactgggaatcaaacttgtctgtctacatggtttctttgggcattccttttcatctgtatagtttgttatggaccatcaatgccggaattattgtcatcgtgcaagctatcttaagtcgttttactatctttaagagcttatttagacaaattttatttggcactttgatgtttgcaatttcttttgttactttgatttttgccaaagattttgcacatttcgccttatccatggttatcttaactttaggtgaagcaaccgcaatgccgtcgattccaacttatgtcaatgatctgtcgcccgattctagtaaggcccgattctagtaagggcaagtatcaaggcttaaccttgtctgcatcgtcaattggtcgagctctaggtccattatttggtggtttaatcattgaagatttcggctatattcaattctttgctgttgctgcaattggtatctttttgcttttagtcatgcttattccaatgcatgcgaaactacagaaaaaactaaaattatttgtaaaataaaaacaacatgatagcgttaatttttttataatgctatcatgtctttatatgaaaaatttttccactagggaggtaatttaatgtattttaacgtacgcggcggtgctggtgacattactaaggctaatacttcagcgcgtctacaagataatttatatttggccgttaactcagaatggttggaaaaggctaaaataccatctgatcgttcaagaaccagttcatttgatgggatcgatcttaatattgaaaagaacttgatgcaagactttgcagattttgctgctggtaagaaggaactgcctactgtgcctaacttcaagaaggcagttgagctttacaaggttgctaaaaactttgacaagcgaaatgcggatggtgccgcacctattcaggcagatttgcacgaaattttagacttgcgcaacttcgctgactttaacttgaaggcagcagatttttacaagaatggttttgccgttccatttgctttcagtgttgaagcagatatgaagaatactaagattcactcattgaattttggtggtccaagtactttcttgccagatacgactacttacaagactccagctgctgagaagttattggatgttttgaaaaagcaatctattaagttgttaacaatggccggacttgatgaaaaggacgcagaagattacgctgacttggcaattaagtatgacgctaagattgctaaggttgttaagtcaactgaagaatgggcagattacccagcaacttataatccagtttcattgactgactttgaagcaaaattcgattccttcaagatggattacttcttgggcggattatttaccaagaagccagaacggataatttcaactgaaccacgttacttagatcacgcggaagaattgttgaatgaagaaaactttgctgaaattaaggcttggatgctggttaagtttattaatggcgtagcttacagcttgtcacaagatttccgtgaagctgcctttccatttagtcaagctttgtcaggccaacctgagctttcaagtggcgttaagcaggcatatcatattactaatggtgacttcggcgaagtagtaggtgtctactatggtcaaacttactttggcgcagaagctaaagcagacgtgactgatatgattcacaagatgcttgatgtttatgaaaagagaattcgtgaaaattcatggctttctcaagcaactaaggataaggcaatcgttaagttgcgcgctttgatcttgaagatcggttatccagacaagattgaagaaatctatgaccgtttacaagttgatccaactgctagcctttatgaaaatgaagtgcaatttggtcgggaacaaattaagtacaatcttgagaaattgtaccaagatgttgaccgtacggtatggttgatgccaggtgatatggttaatgcatgttacgacccacaaagaaatgatttaactttcccagctgcaattttgcaaaaaccattctatgacttgaaacaaagtcgtgctactaattatggtggaatcggcgttgttattgcacacgaagtatcacatgcctttgacaataacggtgctcaattcgatgagtttggtaacatgaagaattggtggactgatgaagattttgctgaattcaagaagagaacgcaagctgaaatcgacttgtttgatggtattgaatatggccctgtaaccttgaacggtaagcaaatcgtatcagaaaacattgccgatcaaggtggtttgactgctgctgttgaagctaacaagggtgaaggtggcgacaagaaggcaatgcaagaattgtttgaaaactttgctcgtgtttggacaactaagcaattgccagaatcaattaagacgcaagtatctatcgacgttcacgcaccaggtccagaacgtgctaacgtgcaatcacaatgccaagaagaattctataaggcatttgatgtgaccgaaaacgatggcatgtggcttgctcctgaaaagagagtagtaatttggtaagtaacttttcttaatatcgagtatgaaaaattagctaaattacatataagctcctataataagaatgactacagtgctgctactacactgcagccctttataacttattacccattaataaattttttgcactaaaaaaggctccctgttgggagtcttttttagtttagtaattatttagttttagctgtcgagtaatcctttggcttaatccgcttaatgtaagatggatttggtcgacccaggattaatggtacacgctcgattacggtatcggcgtattctaagccgaaccaggaagctgggttagaagacaagttttgcaagcgaacccgcgcttccacaagccatttttcatagccaaccaattgtgtttgtggactgatgacgtcgttaacaataacgaatgagaagtcacctacgtcacgacctgggctggtggtgtattcctgtggttgtggctcaatcgtaccgtcggcgatcaagtcatgaacgatctgacgaatgtagacattcacactagtttgcttcttaaagccgaggtagagctgaatgttaattacgttcttcgtaccgtaagtgttaacagcatattcagcggtaaatggctcgttagtaacattgacagtgacaaaccagtaagcctttgctcgtttaggtcttttatccaaaattgagtacaggatttcacgtttgatgaacttattgtacttaacgttggccatgtaaaccaagttggtagcataagttgggtaattttcatcgtgacttaagttcgttaacatgtcggtatattcatctaagcgaacgtaagcattgcgagcttcacgcttgtcacgaaccttgttgccgtaataccaaacatacattatgaagccgatagcaccagcgatgaagagtgaaacgtaaccaccatgagtaaatttagtcaaacttgaaatcataaacatgatgtcaaggacaccgaagaagatcaagaagatccagttccaaacagtgttgactttcttcattactaaccattcataaagcaggatggtagtcattaacattgaaattgtaatggacagaccataagctgcttccatgtgagctgaagtttggaaatataagacgattgcgatagtagcaacacagatacccttgttaatggaaggaatataaatttgtcctttttcgttagatgggtagttgatgttcattcttggcaagaacttcaagcctgaagcttctgcaactaaagtgaatgaaccggtaattagggcctgagaagcaataacagcagcaatagtagccaaaatgatggcaaacaatctgatgttagctgggatcatttcaaagaatggattgagcacaccgccgtctgcaggacggtaagttgggttgttcaaaatccaaacgccttgaccaaagtagttgagtgacaagcaaacaaaaacaaatggccaagaaccaataatattgcttttaccaacgtgaccaacgtctgaatataaggcttcggcaccagtcgtagctaggaaaattgaccctaaaataaaaattccagccttattatatggactgactaataatctaatagcgtaaattggattgattgcttgcaagattgaccagtcaccgaccatgttcattacgcccattacacccaaaaaagtgaaccaaaggaacatgattgggccgaaggctttaccaatgatactagttcccattttttggatagaaaacagaactagcagaatgactacagtgatggcaataaccatgttttgagtagaaacgggtacattgccgccaaagttcagtcctttcagtccttcaatcgcagttgtaactgtaactgctggagttaaagtaccatcggccaaaatagcggctccaccaattagcgctggtagaactaaccatttagctcgttttctaaccaatgtgtataaggcaaaaatcccaccttctccgtggttagttgccttgagggcaataattacggtttgtaaggtagttagtagcgttacagtccaaagaaccaatgaaattgatccaatgataaagtcacgatttacattaccaatgccgccgttgccttcgacaattgatttcataacataaagcggactagtaccgatatcgccgtaaacaataccgatggcgattagtaagccggccgcactcatgcgtttagctttattattcattatctcgttatctcccacaacaaaattgtagttttaataaaaaaagaaaatgccacgatgacattttcccttattgtacctattttcgtctatttcgctggacaatgcaagtgagatttgtcagaaattgaatctagaatttggtgatgataaagttaatgcattataataaaaaatatgcagtaaaaaagctcccatacagggagcctttttgatataaattatgaaagtgatgaaggaatcttagtacgttggtcttcgtcccatttttcccatgcttcataagtaagcatttcttctggcttaacaccagtcttttcttccatggccttaagcaagtccttaaagttgtagtcgtggtattgtaacacatgatcaaccaacttcttgcgtgggaagtggatgttgtttaaaacatagcgattgatatcaaccatgttatgattttcatcgtaaaggttgataacttcaagatcgtcttcatcgaattcagcgatgtagaagttagcgaagacctttaagtaatcaggttgttctttgaattcttcctgtggcatagtagtcttgttagcttctggcattacgactttaaagtcgtcgttttcttcattttctttatcagcttgagcttgagcgttcttttcttcttcagtcaaagttgttacccctttatttataaataaatagatacaaagtcaataataattttacagacttctacaaataaaagcaaatagaagtggttgaggtaagtgtcaatgtttttgcggtagcctttaaaccattagtctaaccttaatttcttaaatatttatatgacttaaatttctgcttagcttgcttaaataactattgccagctacctgtgcggttaatgcgccatgctggatgcctaaatgaacttcatgacgcttctttaagctgtcacgggccgctgcttttaattcctgttcagtcaatacagttatttctgaatcttcaaactcgctgctaagccaaaattccagctctcgattcttgatgcagcttaagatcctaagcatgccttctgctccagattttgaccatttcttgccttgccccttaacacggtaggtatacttgcggtggttgctctcgcagcagccaatggctttagtcacagtcagttttcgtttcttaaacggcttaatatcgtcccaatgacgatcaatataattccttaggcgccccagataatcatgattgagctcggtattcaattcatcaattagtcggctttctgcagtggttaggatagttttaactttgtcatagctgtatttgtattccaaagcagaaatcagcttgccttgcaggtcaggcgcaaaatatagcctttctttgattttcttatttaggtgaaagacatccaagaaatgctcatgacgcttgcatagccctacaatgtcatcgaagtctgttttggcatatccagcaccgccatcggcgttgctaagaattacagtatcagaaagatcataagtattggccaggtactccttggcttcgttcagcgcatcaagtcggcttaaagaaacaaattccttggcattgattcgctttctgcgtttcttgcttatattgacaatgccttcacagacctgatagcgatgaaattccaaccggcttttagtgcctttgatcaccacgccatcgccttcaagatacaaaactgggacctttttcttagtgcctgcggcatcatatcttgaatctgcttcttggcccgctttaatatttttcccggccatttttaccaaattgcccacctgcatatggctaatattaaagccagacaggcaattgactgctagagcagtattgcgataagtggcaacgctgcttacttctaagatgtttttgactgctaaaatactgtagcgcttgtatttgtcaaagcccattaattcatccaagggataccttgcttgtttgcctgggcagacatatcttcttctgacatacctaacttcgccaaaagccatattgattgagcgctcattcttcttatcaatctgatagccctgtgctttaaccttggtaatcatttcatcatcaactttagctaaagccaaggccatgatttccttaatcaggtttaagaagaaacagattatttttctttcacgcttaatataattatcttcagactttataatatttgcgatttcagttacaattgaattcataaaagaccagcttctaatgtgttttttgttcttaacatcagactactggtctttttgtttgagctcaagtccaaattcaaaggacttgggcttttttaattatttattcaacttaccgtaaaaaattatacacttagtggttgagagatgcaaaagtatagaagtcagttttgattagtaaaatggagtaaaatgaagtaaaatataaatgtaaaaagtaaaatgaagtaaaatgaggaaaaatatgtataatgaaaatccttttgatgctgaatttggcgggatcccagagctatatcttgattttaatgatgatgcagttaaatttgctcaaagagcccatcgtctcaagaaacatccaacttattctctctttattacaggggtacgaggttcaggaaaaacagtttttatgaacaaagtgggtaaagaactaaaaaaatataaagatactatggtagtcactttgcacaattctgatgatctttttcgaatgatgtatatcaagctagtgcctatgctagataaaatcaaaaaatggacgccatcaatttctattaaagttccttttgtatcagtagatttcactgaagcaaatgaaaagcatgatgaaatatattataaagtagaaattaacaagattcttaaagctttgaacaaagtggggattcgtgttgcattttgtattgatgaagtgtcaaatacacccacaattcaaaaattggctgaggaattcaacgactggagcctaaataactatcaagtttcagtgattatgaccggactattaagtgaagtggcggaactatcaggcacacataatttaaccttcttggttcgggcggatagatttcacgtctctaaactatttgcgtcgtcaattgccagaacttacatggatgtattagacataacagctaagcaagcagaaattttggcagatatgtcaaaaggctatgcttatgcatttcaattgatcggagatttgatgtatgaaaatttaagtcaaaagatgacgtttgaaaaagctttggaatatactaaacttagattccgtgatgtacttttcaaccaagcgtatgatgtaattgctcatgaattaacggatgtggattttcaatttttgtacgctatggcgcaagataatagtattagttcaattattaggactatgcaaaaaagtaagcagtatgttaatagctatcgtgcaaaattaattaaatatgatctaattaagccaataattaggggaaaggtcggctttaccttacctttgtttagagatttcattcaagcaaagtatgatgagcttaactggggctagaatttattgaaaaaattcgacagaaaatcacagaaatgaacgcagatccagtttggagggatactattatggactatgagactaagctagctgaagagcgtgaatacggtgaagaaaaaggaattttaagtgcaattaagaaaattatttatcgtaaccggagctatggtgtatcagattccaaaactttggaggatctgacagaagactaccatgattctgtttcccgggatcaaattgaacaaatgatgaaagaagcctaggtctaatgaaaatagccgctgctcaatgtgagtaacggctatttttttacttgttatcatcagcagcagagctggaacttacggcagatgattgatcgttgcttgaggaagccgcgctggattggttgatggatgataatttaagtaattattcttttgaaaaaatatttcttacttgttggagtaaattatcgaattctgttgattcttttatgtggccgattatttttgcatgacgggcaatgaaatcatacgatagcatttgaaataataatgcatccccatttgtgtgactagcataatctagcacatagaatctaaatggatcatctgtaatatggttatgagtaattgctagtcctattactaatccagactttttagtgtaagcatgtctgctcactactaaatagcgtctacgaatatttcctttttcagaatcatgtccacccatttcgtgaccagcatgtggttcagcatcgatcattattatgtcaccttgatggacatcaatccttctcatttgctagttcctttccgacaggtttgacttctctaggattgtatcctaattcttggtattctcgctttatttcagtatcataatcataatcgtcataagcggggtctgaccataaatcataattgtttttagcaattcttttgtatacaatatcaccgtttttatttacatcaacagagaattctgtattaagtggaactttgatagtacttggaatggtaagcactattgaatttccttgttttctagccttgactaccataataagccctccttatgctaaaaatattttattatttaagtatatactgtgaatacagtgagcacaaacaaaaggagccacaaattggctcctttttcgtttgcttacttgttatcatcagcagcagagctggaacttacggcagatgattgatcgttgcttgaggaagccgcgctggattggctgctggatgattgttcctgctggtgatcgcttgaagaagatgaagaacttgattgatcatctgacttcttgtttgatgagctggacttcttggactgctctttatccttatcagatgaggattttgcagaatcatcctgactagaattatctttgttagaatctgcatcagaattattagatttttgctggtcaggatcagcgttctttttattggaattattataggaagtattattgtgcgtttgagtgttggcatggctaatgtaagcaccggcgccacctccacctaagatgaacatcgcagcaataacaccccaaaagactaatttcttcatattaagacaactctcccttatcttagaaaaaatattaacgaatttgagccaattggtgactttgaatcgttagttatagtgtaagacatctggccggcaggttgattacaaaatactcaattttaactaattattaagaggtagaagaaaaatatgaattacgaattaactgaacaatcaatccaatatgtatttggcaacaagaagtataagaatgggcaaaagacccgtaacttgaagaacgtaaagactggcgctaaggcagatgagttgcaaaaggtgggtcaagcaattgctagtttgcaagaagactcacttgatgaagcatacttagtgcagaagtcacgtcttgtaccagcagctgaataaattaacgaacatatttaggaaataaggagaaaaaatgatggctaaaactactaagactatgaagttaactttcttgaacggagaaaagaagaaaattagtattacgttgggggatgcagtcgataatctaactgcggatcaagtacgcggtgcgatgaacacgattgcggaagccgatgcattcgagaaagacggtgttgcatattatcacactcctcaatcagctgcatacattgaacgcactgttactgatatctttaatgattcagcagaatctgcagttgagcctgcagctaagcaagactaatctggacttgcttgaccaactaattagcttggtcaaaaggctcaggagaaaatatcgcaagatgtagagttcacacttagacctttaacagaaatcgtatagtaatattactttttcaattgattttgttacatcgttgtaaaatttaagaaaaagtaaagaaacagtaaagcgggcgtatgctcgctttttcttgttgtgtctaggattacggcattttgttattttagatttgtgtgaatggtattgggatagggaataggtgaattattacaaaagcaagattgtagtcaatttaacttgctattttttcaagaggttagtacaatatgaatcgtggtaagtaataggacgtgcttcaggcgtgtcgcctgtacgcatgctgatccttcagcaatgactactacctcatgagagttataaactcatggatcttgctttgaagaattttgtacattataggctccctacatgctgaacctatggcctattacattttttatatttcaaggaggaaaagaccacatgaagaaaaatttaagaattgttagcgctgctgctgctgctttattagctgttgctcctgtcgctgcttcagctgtttctgttaacgctgctgacaacaccgttgcaaccactaccaacacagcaaacactgtaattaatgctggtggtaccgcaatcaacactccagctgatgcaaaatacgatgttgatgtaacacctaaccttactgctactgcagcttctactgtaaatggacaaactattaacggtagcattactggtaacattactgctagttacaatggccaatcatacactggtactttagatactaagaatggtaaagtttctgtagctgactcaaagggcactgctgttactgatttctcaaaacttactaatggttcatacactgttactgtaagtggcgtatcattcaactttggtactgctaacgcaaacaagactatcactcttggctcaaagaacagcaatgttaaatttgcaggtgctgacggtaagtttgctgatactgtaaatgttaaacttggtcaaaatggtactttaactaccccaatctcagttcaagtttcaaacgttaacgcacttgacctttcaaatgctaacggtgttaacttctacaacgcttcaaacggttcacaagtaactaagggttcagttaatgtaactgctggtcttaacggtcgtttgaacgtttcaactgttgctagtgaaatcttaaagaactttgctgcttaccaagtttcaaatggtaagcctgtatcacaattgccagaccaaaaggctgtagttgctgatgttaacgctgctttaaaggctgctaatatttcagttgacaatgctggttggtttactgctccaacttcattctcagttaatgtaaaggcaacttcatcaattaatggtgttgacgctactttacctgtaaccgttaatgttgctaacggcaaggacatgactgtaccaagccaaagcaagactattatgcacaatgcatactactacgacaaggacgctaagcgtgttggtactgacaagcttacccgttacaactcagtaactgttgctatgaacactactactatcaaaggcaaggcttactacgaagtagttgaaaacggcaaactttcaggcaagttcatcaacgctgacaacattgatggtactaagcgtactttgaagcacaacgcatacgtttacaagacttcaaagaagcgtgctaacaaggttaccttgaagaagggtactgaagtaactacttacggtggtacttacacattcaagaacggcaagcaatactacaagatcggtaacaacactgacaagacttacgtaaaggcttcaaacttttaattaagtctatgtagtagataaggaaaacgaggcaaatgcctcgtttttcttttgctctgaaaaaaggcgccgcttacgcgacaccttggaagatattctgctgtgaactattgattactgtttactgatagactttatgtactagtttgataatttcatcgcggttaagcgtctcgccataactatttgtgagttcttgtagggctgtatctttagttccgtccattcgcttaatagttaggactagcttcttagcatcttctatttttacttttttagcaacctcattcatttcgtattctagcttgtccatgtcttcgacccactttccgctattcacgtaatggtcgacatccttttgcaagctggcgatgtaaccttcagggtgattgatgattccattcatgtaatccaagaagtcaatcatcttttggttcaggtcatgattattgcccttagaattaaaaactttaacgtgcgtaccagtctgaaattcaattcttcttattgctcatgacgtgaccaaagaccaaatcgtcagtgattctcggatatcgactttttattttaatcatattttacctcatttcaattattgttccatcacattacgtaatttacctaaaagctgctttttcaatcgtttcaacgtaatacgcggtataccgcattctttaactagctgcgtaattgtctttttctcaagcaaatgctcaaaaagaattacttgctcaagttgacttagtttcttaatctcattctttaaagctacaagattatcccatgcctctgttttacctaagtcataagccttgtcaattgcagtattgcgttcacatacgcgctgttctcggcgcagagcatcaattgtctgccaaagaacccttttgaagctaagcttattaatctcactgcgaaccttttgcccatctaatttgcgcaacatctcggcatacaaaattacaccttcttgcaacagatcttcatagagatgatagtccggtcgaacatgtgccgcctttaaggcaccaccaactaacttacgatttttccatgcttcttcgaaatatttttgacttgtcattgtgacactctcccaaatgatgtcacaagcgcttgtgcaatattagattagcaagattaattattgaaaaaaactaggtggtgggtcctcatgagcactagagccatgcaggtttgcatatttcaataaatgctgaaatcaagtccagcaatacctgactgagtacaattaatagtaaaaaaagtgcaaaaaaaatacagctcatgagagctgttaacgattatatctgatcttaataatctgcttagtaaaaaagcggtgttcacggtgcaaataatctaatggcttaaattctttcacaattgtaagtaggtgtaagttcaaaacatgattatagaatttgtctgctagctttttaaaactatcaatagtatacaagtccagttgcacataatagttggaattatgcaggattgagtcagaattaatggctgttacgcgaagattattttcttgcaacatatgctgataatacaagtcagaataataatgattatgaaacagatactgaccaattatcttagtaagattaggcttaggcgaatcaaaggcaaaattatagaccaagccatttttatcaagtgcaatactgttgaaaatagcttgatcatggcgtttaacgtggaagtctttaatccagtgcaagcaaatccagtccgtgaagaaatttccactaaatgcatgcattgaaaaataaagcacattgtacatgacaatcccttgatagatatcaactccagcctcgcgagctagcattctctgccaaatcatatcgcaatgtacggcatgccgcatcaatccttgcatcatggcatatgttgacttctgactaagcacaattccacgattcaggtcgaaggctaccgccttatatttgcctaagataggatgttgcttgaactcatagactgccaatgtgttcttattgagtcgatatttattgtcatacgtaatgtactgcgctagttgcgcgtcattctcaattctccatttggtaaggtccttggaccaattacgatattttatgtcagtgggcaagctaataatccccaagttacgttgcttgtaggctgacacattcatcacactccctatgtttgaatatatctatattattttgaatattgaatagtattatacaggatgaagcattgattgtatagctagaaattattatgctgaaaagcttattttttaattaaacagaaagctgcaattaagtctacgtaccaaactatcaatgtaggcaatcatgcagatatattgcaggatggcttgactaaaattataattaattcaaacggagttcctgatggaaccgagactgaaacattacttaatttagtcaaactcatgaaagatttgccagtacatggcgataaactttttgatagggcacaaaaacgcatcgaatcaatgaatgccgatccagaatggagggatactattatggactttgaaactagaatgcttgaacgcgagcaagttggtgaaaagaaaggccttaaaacaggtgcacttaccttagtcgcttctttgaaagatgttggctgcaatagccaacaaatcctgcagcaattaaagcaaaagtatggcaatgtattttctgataagcagttagaagaatttctgaaacagagctaggtcataacaataatattttctgaggatgtcgcaacagcggcgccttttttagagcaaaagaaaaacgaggcatttgcctcgttttccttatctactacatagacttaattaaaagtttgaagcctttacgtaagtcttgtcagtgttgttaccgatcttgtagtattgcttgccgttcttgaaggtgtaagtaccaccgtaagtagttacttcagtacccttcttcaaggtaaccttgttagcacgcttctttgaagtcttgtaaacgtatgcgttgtgcttcaaagtacgcttagtaccatcaatgttgtctgcgttgatgaacttgccagtagccttaccattttcgattacttcgtagtaagccttgcctttgatagtagtagtgttcatagcaacagttactgagttgtaacgggtaagcttgtcagtaccaacacgcttagcgtccttgtcgtagtagtatgcattgtgcataatagtcttgctttggcttggtacagtagttaccttagcgtttggaacgttaacagttactggcaaagtagcagtagcgttgttcttgtttgaagttgcaatcaaattgaaagtaaatgattgaggagcaacaaaccaaccttgtgcatctacttcaacaccagcagccttcaaagcatccttaaggttatttgagtagctaatgttgctttggtcagaaccaagttgagcagcgtagtatgcattacccttggtttggtttacaggaacagctgcaagaacttgtgaaacgttcatcttaccgtcatctgcaccagcgtacaattgaatgcttgctgaagttacagctgcgccagtagtaccattgtgccaagtaacaactgctgggttagcaaagtctttagcagttacgtccataacaacttggtataagttaactacaccattcttgtcaagttttacttcgagtgagtggctcattgcatcttgttctgtacgtgcagcccagccagaaccgaagttcaaagtaaccttcttgttagcattttgtgaaccaaagttcaagccaacattagtcattgaaaccttgtaaacgtcaccagcattagcttcagtaacttggtttaagtcagtgatttcttggctacccttgaaaagttgaatctttgaagggtttgatgcgttaacgccaaagttagcgttagcagtagtaccgtcaacagtagctgagaatgatactgaaatagcaccacttactgagccagccttagtatttaaactaatgtttggcttaacgttaacagtagaaccagaagctggtaaagttacattacccaaatgggttacattagtaacaggtgcagctgaaacagtagaaacagctgaagcagcgacaggagcaacagctaataaagcagcagcagcagcgctaacaattcttaaatttttcttcatgtggtcttttcctccttgaaatataaaaaatgtaataggccataggttcagcatgtagggagcctataatgtacaaaattcttcaaagcaagatccatgagtttataactctcatgaggtagtagtcattgctgaaggatcagcatgcgtacaggcgacacgcctgaagcacgtatattgtgtaatcgatttttgccaagcaatgaaagggtggtttttgtcctcttatttgcttggggttggttgggtgggttttgtccgctgcgcagatacttttgtgaaaaaagagtacgatgcgatttgatgatttagagtgtcgtttttggttttgttaagggatgcttgtaaaataataaggtaaagaaaatctaaagaagtaattttgtgaaaaagaaatcgacattttttgcgtacttatatattgtcaaaattaagatatgtaggtgataattatgttaaataaaaaggataaaactaaaattcaagaattaactgataaaacagtggacttgatcgtagaaaatatggggaaatcgcgtaaagaagcggaacaagattttcaaaagtcagatacatatgcgttcttatggctagcgaagcgtaatattgaaaatgagcaccctattattttgtacagaatgtttaattctgagttaaaagctaaaccaatagatgaagaacaacaaagttttattgactttatgactgataacacaatcgagttaattacacagaatactaattggggaagataaaaggcaactaaagttttcaaatctacaaaggtatattggatactagttcactcaggacataatttagatgaatcttctcccgaagagctgttttatatgtttagaaataaacttagtataggtaatccactaccttcatctacgctgaagttaacttattaaaaaatttatataagttaaataatattattacaaatgttacttttttacaataaatctgttgaaacgcttgtctagacctaatttgctagatacaatggaggtgttatattaaggaggataattttttatgaagaagagacttttgaccagttttgctgctgccgcaatgcttactcctgtagctgtgccagcagtaaatactacgatgatgaatcaagcctcaagccaacgagtttctgccgctaccgctgatcaaactgcatttttgaataaagctgctaagcaagctgtgaaagcagctaaaaaatatggaactttgccatcagtgatgattgcccaggcaataactgagtcaggctggggaaagtcaggattagccgtgaatgctaataacctttttgggatgaaggctgatgattcttggacaggtgagacttatactgccaagactagagaagaagataaaaacggtaagagctactatattactgctaagtttagaaaatacccatcttttgaacaatcatttgaagataatggtagtaaattaagaaatggtgtttcttgggatccgttgcgttataagggcacttggattgaaaatgcatcaacttatgcagctgcaaccaaggctttgaccggtacgtatgctacagactctaagtatgataaggcattaaatagtcatattactagttctaatttgactaagtatgatccagtaaccgttaatactactagaacttatactgctggcaaggatagttcaacttataattggccaactgctccatctgttgccagtgctattggctctgttaaagctggtgaaaaagtagtagttaccaagactattactttccatgatggttcaagcagaatgtatattgatggtcgtggttgggttaatggctcagttttggacaagagcagttctgcaactaaggaaccagtaactcaggcacctaagaatgtgccagctgtttctaagaacttgatgcataatgcctatgtttatgaccaaaatggtaagaagctaaagggcaagatgtacaagaccagtgatgaaaacggtggtaagtggatcaatacttatggtaccaagaccatcaagggtaagacctactaccgtgtcggtgaaaatgaatacattgcagctggtaatattgatggtagcctcagattcttgaagaagaatgcttatgtttacaatcaatatggcaatcgcgataacaatttgaagcacaagaagaatagccaaattgctacttacggcagtgctataactatcaatggtaagaaatactataaggtaggtattcgtcaatacgttaagaaatcgaacttcatgtaattaaggaaagggctttgttgtgaagatacgcaaatttttaattgccttaattgcgcttttggggttagtcggcgtatcatcggtcagtaaccaggtcaaagccgcttcgattaatactttagcgaagaaatatcaatatagtggtgtcacctatttatacaagatgctcaaactagaggggattaagtacaataaattccctggtgttgagtatcaaaatggcaagccagaaggaattgtcgttcatgagactgacgatcccggagctactgctcacgatgaagcaatctactttaaccgcgagtggaaaaatatcaacgcttacgtcaatgcttttgtagatagtaagcaagtcatccaaatgtattcacctaataatggtacttggggcgcaggaccgaatgccaacaatcgctttattcaaattgagctttgtgaagaagatagtcgtgatgcctttgctaagtcagttaataatgatgcaatttatattgccaagttgcttcatcgttacaatttaaagccagacaatgcttgcgatgatggtgaaggcacaatttggtcacacaaggcggttagcaccttcttaggtggaacagaccacgttgaccctgatagttattttgccaagtgggattacgacatggatcagttttattctttgatcgagtattactatgacttgcaaaagaagaatgaaaatactgatactaaggatccaaataagattaaggacgaagtaccagcagaagttcaaggtgcggtaactttaggtcacgatgcttatgtttatgacaagaacggcaagaagaccaagatcttgaagttagctggtagtccggtaaccgttttaggctacaagataatcagtaataagaagtactatcaaattggcaagaacgaatacgtagtagctactaatattgatgctactgctagaactgttaagaagaatacatatttgcggactcgttcaggtcgaattgaaaaaggtaatttggtcaagaagggtagtcgggtcatgacatatggcagcaagattacaattaaaggtcaaaagtattatgctttaaatgctacacaatatgttttagctagcgatattaattagaaaaatacgtcttaaaccataaataatgggaattaagacgtattttttgtataattcttgtgttgaatgtgaaaaggggagaatttaatggcgcaattatcattatttttggtcgtcttattagcgctcgtaattccaatatttatggcgcgtttcaaaataagcactgtaccaacggcgattgctgaaattatcgtcggaattattgtaggttcgagcggatttaatatcgtggtttcgatacatgatttaacatttttatcgaacctcggcgtaattttgctgatgtttttatcaggaatggaaattaattttgacctgctacagcgcaagaataatcctaaggctaaatcacaggcgggaaaaactgtcgatccgttgccaacagctttaacagctttcgctggaattgtggtaatggcctttgttttggcatatgttttaaagctgatagggctatttagcaatgttatcttggcagcgattatttttatgaccattgcattgggtgtagttattgctaccttgaaggaaaaggatattcttggccgaccgattggtcagacaattttgttaactgcggttttgggcgaagtaataccgttgctcttattaacgatttatgcctcagttaatggagggaatgctggccagctttggttgattatcttactgtttatcgctgcgattattcttttgcggcggtttaagcaaccgtatttatggtttagcaaagtaactaaggcaacgactcaattggatattcggttagccttcttcttgatttttgctttagttactgtagctgagcgagttggtgctgaaaatattttgggagcattcttggccgggatggtaatgaaattattggaaccaagcgaggcaactaaagataagctaacttcaatcggttatgggttctttatcccaatcttttttattatgactggcgtgggcttgaatttaaagtcactatttgctcatccatcatcattgatgttgttgccagttttggtcattttcttgttcttagctaaagctcctgtagtttttctttatatgcgctattttgaaaaaaaaaatgcctttgctggtggctttttaactgctactacaattacgattgttttgccaactctacaagttgctagaaaattgcatgcaattacttcaacacaatcagatgcctttatcttagctgcggttattgtttgtatcgtgagtccgattgtctttaattcaaactttgttttatcacctgaggatcggatgaaagaaactgttactattgtgagtgccaatacttttacggtaccagttgcacatgatttgcacgataattggtatacgatcaagatgtttaccgatcagcaggaccaatacgaaacttatgatagtagggttaaaggtttaacattacttgataatttggataatcaaagcttagagcgtagtggtgcctttgattgcgacattttcgtagctgcagggcatcatgatcaagaaaatgcacgaatggcggaatatgccaaagacttgggagtcaaacgagcaattgcccgaatgaatgaagtcgatagcgatacgatggctcgatgccaggaggcaggagtagagttgttcaactttactaatgtacgttctgctctgatgcgagctttgattgagtctccaacggtctacaagattatgactgatactaacaatgtgttgtactcagttaaggtgagaagtacttcctatactggacgaccacttagggatctggaatttgtggacaagattacggttagtcgaattcggcgtggtgatgagtggttaataccacacggttggactgttattgagccgaatgatatcttgatcttttctggagaatttaaggttgctgatcgagtaaagaagttacttagtcatcaaaattagagataaaaagaggctaaatgcaaaaatcctgcatttaacctcctttttacgtaattaatgattttgtccttcaactgcttcaatgtcgccttgtccatcgcgctcaacaatagccccaattgcagcgattaagcctttaacaatatcggctaatgccattgatggagtgcttggtcttttgacaacttgttctggcaaaaatgggatgtgaatgaagccagctttaaggctagggaattctttagctcgcatgtattgcacttgataaaagatgtggttgcagacgtaagtaccggcagtgttggaaactgtagcaggtagaccaacagcgcgaatcgccttagccattgccttgattggtagttgggtgaagtaagccgtgtcgccatcggcttggataggttcaccgagcggttgataaccatcgttgtcggggatgcgaccatcgttaatattaatagctactcgttctggggttaaagcagcacgcccgccagcttgaccaacattaagtacataatctggtttttcttgcacgatggcatcatgaacaacttgggcagatttattgaaaaccgtaggaatttctaatttgataatttttgcacccttgattgagtcaggtagttttttgactgcttcaatggcggggttgatcttgtcgccaccaaaaggatcaaaaccagttactaaaattttcaatggcttttcctccaaatttaaatcatagaattttttgctttagtcaaaatttgcattgtctctaaagtattgacaaatgcttcatccgctttttgcgtatcgtgttgatcaatcatctgggcaaaagtattaaattcagctgccattcggtgcggatatttatttaaattataacgcttaggttgctcatttctcatttcaactgtgaaattatcaagtgttcccgttgagccgtcaaaatagatactacctttttcaccttcgataaaagaacgtggcgttacatagctatcttttgatgccgtgagggaggcttgtttgtcaggataagagaggtgaagaataccagaagtatcaacgcctttttgcatgttggcataatattgcacttgatcaggcaagccaaacaatgccgagacaagatgaatgttgtagatatttaaatccattaaagcaccgccatcttttttaggatcaaaaaccggcgcaattttgccttcaagaaaggcgtcatagcggctagaatattgcgtataatttaagttaacaatatgaattggtgcgatcttgttcaattctttttggatttgtttgaagttttctaaataaaggttagtaattgcttcaacgatgatcaaccccttttcgtcggctaacttttttaattcttttgcttgagtggtgctctgaacaaatggcttttcacagattacatttttatcgtgttctagagcagctttagcaatctcataatgcaagaagtttggcaccgctacataaactgtatcgacttcagaatcagccattaattcttcattgtccgtataagtacgtttgatgttgtactttttagctaattcccgggcaatattttcactgcgcttagttgaggaaatagccgttacagtcatattcgcaacttgatcagcggttgttaaaaagtcatggacgatcatgccgctgccaataattcctaatttcatttttttgcctacttctttttagtattagtggttggtaaatctttagcgttagttgcagagtctggtactcttaagaagtcatggctgccgaagttgccataactttgaccaactttaacgtacattaatttacctagtttcatattaacaaagacattaaaggtagataatttattacctttaattacagccttaacattcattgattggtacttgcctaattttttaatttggctgaaaattttagcttgatttgtactttgagcagtagtgtcaaaaattggtgctgctgcctttttcatcaaagcttggtcagtacttttagcagttaaagtataagtgtaaacaccatcttttttgctttttttcattttataagcagaaaccaacttatcacttggattggtgatcatgtggttattcatgatggcatcggttaagtcggcataattatgaccggttagtttttcaaggtcagccttgtaccaagtatcttgtccattaatgtagacattgttaaggttgacccattcctcagtagaactagttttacctttgctagtggtttgattggtgatgtggtaaacagtggttttaccaccaaaggtagtgttagctaaggcaacttgattagaagtgtcggtacccagagtaacagattgaataacctgtcccgacttgaagctacttttagctttttgtacaacttgagtcttagtcagagctgaagtagccttcttctcttgtttactgcagccacctaataaaaagaagacagcaaaggataaaccgataatcgttttcttaagtttcatttttttctcctctatgcttcaataagtctattataactaaaaagtccgttgctcgttggagttacggactattcttttactttattttgtattaattttgcctaaatctacggccgatttcttgatagaagcaggtaccgtcaactttttgacttgattaatttgatcaatctgcatggtgaaattctttttgtgtccttcatccttataagtagaagtcacattaacatttttgatgtcgtaattctgatctacgttaattttgatttcgttgctaattggtttaacatcatcaagatcgatgccgattaaagcagtaaaggcagaatcagatacaattgcgttccaaatttttttgttatttcctttataagtaagcagataatcattgccgttttgctttaccttaaaatattttgcgttagggatgaaaggcatgagtaatgtgccgttcaaattgtcggtaatggcaccataggcactagtcttagacaactttgtcttaaaccaacgctgagaattggtacctttcatttggatatagttgcttttaccctcaatccacattttatagtgattagagctgctagaaacattagcataaataatcgttggctttttagtatattgggcttcggctttttgcaaagacttgccattgcttaattcattccaagtagcgtgcattgaactgaatttcgttttttccgcactggttaaaatcgtcttggcagtaggtaaattagctgtcttttttgaacctgtcttagagcaggccgttaaaaagagtaatgctaataaaacggtaatgataatattttgatgtttaaatttcatacataactttctttcattaaattttttcttctagtatagcaagaataacgttacaaaattgaaaaaacacgatttttttagtcttaactctatgaaaaaatttgtgaaatgtgtaaaatatggatgaaacattgaattttaaaaggagatatttcatgtcaaaattagttttaatccgtcacggtcaaagtgaatggaacctttcaaaccaatttactggttgggttgacgttaacctttcagaaaaaggtgttgaagaagctaagaaggctggccgtttaatcaaggaacacggtcttgaatttgaccaagcttacacttcattattaactcgtgctatcaagactttgcactttgcacttgaagaaagtggccaactttggattccagaaactaagacctggagacttaacgaacgtcactacggtgctttacaaggtttgaacaagaaggctactgctgaaaagtacggcgatgaacaagttcacatttggcgtcgttcatacgatgttttgccaccagctattgatgatgacaacgaattcagtcaagcacatgaccgtcgttacgcaaacttggacccacacatcgttcctaaggctgaaaacttacacgtatgtcttgatcgtgtaatgccattctgggaagaccacattgctccagatttacttgacggcaagaacgtaattatcgcagctcacggtaactcacttcgtgctttgactaagtacatcgaaaacatttctgatgaagacattatgaacttggaaatgaagaccggtgaaccagttgtttacacattcgacgaaaacttggatgttgttaacaaggaaaagttggacgactaatttattaagtagttattcacacaaatagaacttcggcgtaagtcgaagtttttttatacaccaaaaaaggcatcaccgttaagggatgccttctttgtatcaacttgctccaaaaactataattatttctttgatttcataatttttttggaacaacttcattatattataaataaagaaagatcgccatttttttctaagaaagtgctaagtgtataattttttacggtaagttgaataaataattaaaaaagcccaagtcctttgaatttggacttgagctcaaacaaaaagaccagtagtctgatgttaagaacaaaaaacacattagaagctggtcttttatgaattcaattgtaactgaaatcgcaaatattataaagtctgaagataattatattaagcgtgaaagaaaaataatctgtttcttcttaaacctgattaaggaaatcatggccttggctttagctaaagttgatgatgaaatgattaccaaggttaaagcacagggctatcagattgataagaagaatgagcgctcaatcaatatggcttttggcgaagttaggtatgtcagaagaagatatgtctgcccaggcaaacaagcaaggtatcccttggatgaattaatgggctttgacaaatacaagcgctacagtattttagcagtcaaaaacatcttagaagtaagcagcgttgccacttatcgcaatactgctctagcagtcaattgcctgtctggctttaatattagccatatgcaggtgggcaatttggtaaaaatggccgggaaaaatattaaagcgggccaagaagcagattcaagatatgatgccgcaggcactaagaaaaaggtcccagttttgtatcttgaaggcgatggcgtggtgatcaaaggcactaaaagccggttggaatttcatcgctatcaggtctgtgaaggcattgtcaatataagcaagaaacgcagaaagcgaatcaatgccaaggaatttgtttctttaagccgacttgatgcgctgaacgaagccaaggagtacctggccaatacttatgatctttctgatactgtaattcttagcaacgccgatggcggtgctggatatgccaaaacagacttcgatgacattgtagggctatgcaagcgtcatgagcatttcttggatgtctttcacctaaataagaaaatcaaagaaaggctatattttgcgcctgacctgcaaggcaagctgatttctgctttggaatacaaatacagctatgacaaagttaaaactatcctaaccactgcagaaagccgactaattgatgaattgaataccgagctcaatcatgattatctggggcgcctaaggaattatattgatcgtcattgggacgatattaagccgtttaagaaacgaaaactgactgtgactaaagccattggctgctgcgagagcaaccaccgcaagtatacctaccgtgttaaggggcaaggcaagaaatggtcaaaatctggagcagaaggcatgcttaggatcttaagctgcatcaagaatcgagagctggaattttggcttagcagcgagtttgaagattcagaaataactgtattgactgaacaggaattaaaagcagcggcccgtgacagcttaaagaagcgtcatgaagttcatttaggcatccagcatggcgcattaaccgcacaggtagctggcaatagttatttaagcaagctaagcagaaatttaagtcatataaatatttaagaaattaaggttagactaatggtttaaaggctaccgcaaaaacattgacacttacaagaaagtggtgaaaattgacagttgtatatgataagtgctattttgagttacaggagtgtagaaattgggagaaaaatatgcaaacaatcgataattctctctttcaagtctctgtcgatgagaatggggcccggatggcacatctggtgtctttaacagatcaatttgattatctcggcgagcaagaaagtgaagaaggtatggcacttgcttttccagtaatggatcaagccgataatttggctaacaagttgccttggaccgttgttgacaaaggtgatactcgcgtaagtctaactttaattgatacgccggagagctataagatttttccatatcattttgaagtaatgactacttatgctttggagggtaatcaagtcaatatatccttttatttgaaaaattcttcaaataaggaactgccattttctttgggctttatcttaccaacttcttggcaaagtgaaagccaggtcaataagattagtttgactggcaaagaacatggcattgatcttacttcaactgattttaagttgagtgcaaaagaaggaagcgttacagcttttacggataaaattgaattagaggcaaaaagtagccgtaattttgcgttaagcttgactttgaagtaaaaattagtaacgattttaataagatatactaagcaagtcagcgatgatttgctttttttgttataatacattcaatgtgaatttacatcataataggtatattttatgaaagatagaaaacaaagatctaatcacccgcataatagtcgggtagacacacacagttataaaaatcgtcatatttgggtctgggttattagtatcgtagccttgcttgcggttgctggagcggcgtactttgcctcagtttatttccgtactaagtcagcggttgataagacctatgatcctaagactgcagtgaaaactacaggtgaatttgatggaaagaagaagttcgctgttttactgatggggactgatacaggtgcccttgatcgaactgaaaagcgcggccggactgataccatgattttagctgtagttaaccctgctaagaagcgttacacattggtctcaacaccgcgtgatacgatggcacagatggttggaagcgagagcttcaagacagaaaagattaacgccgcttatgaattaggcggggctaagatgtcaatggattcagtttctaagttaatcaatgtgccaatcaagtattatgccgtggttaacatgggtggaatcatgaagatgattcgctatgttggcggaattaatattagaccaacgcttagctttgaatatggcggttatatttttaaaaagggcaagctgacccatatgggtggtgcaggtgcgctagcatattctagaatgcgttatgatgatccgcgtggagattatggtcgtcaagaacgacaacggcaggtaattaccaccttgatcaagaaggcagtttcaattagttcattatcaaatctggattcaattttgacttctatgtcaagcaatgttcggactaacttgccatttagtgcgatgcagcagattgcgatgaattatcgtagttgtgccaattcgtcatctagtgattatctacatggttacaatgcaatgatcgacgatgcggcttatcaagtacagccaactagtgaattgcaacggatttctaacctggtgcgcaaagaattagggttacctaaggaaacgatttcaaataatgaaactttccaaaacgaaaagaatattgcaaatggctttagctttaagagcgaaaaaacgcagcactatcatatctatgattacaccgaagaaggtgataattaatggcgcgcatttgggctactctgattggctacgtttttggaaatttcttaacggcgatgatcgttggcaaaatctttttaaaaataaatcctactgaatacggttcacataatccaggaacggctaacatgggtgctgtttttggtaaaaaatggggtattttaacctgtttaggcgatttgcttaaaagtttaattgccttgtttattgtatattttgcttttccagctcatattaatattgcttatacagggctaggcctgatcttaggacattgttttccaatctgggatcattttcgaggtggcaaaggagttgcggttgcagctcaggtagcagttttttataattggaaagctggctttgctactttattagtggctttggtattaacagcaattatgcaaaatttgacgattccgcctttagtgtttatgcttttattcagtataaatacattcttgcataatcaagaagcaggatttgtttttatcgtgattactttgatcatgtgctttaagttctggcatgatatcgtagactttttcaccggtcatggcaaaaaggttgatattctgctttcaattaaaaagaagctagggatcattaagtaatgacagaaatttttagtgaggacacagactagagaaaatgagtgagattaacaagaaaaaatcactaaatgctcttcaaatcatttgtttgattgtcgcagcatttttcatgctagtgcagatgtattcttggggtagcacttttggtagattaccattaagtaccctaatgagatttattccaggactacttggtcacagtacgatggtactagtaccaatggtctttggtgctgtttatagcaaaagaaaagttcatccaactgaagcctttaagttttggattatagcggttgttacactagtgcttttatacttggtgaacttctttaaacgaccaggtacctttaatatgtggaagctctggggagtatttttcccagttttgactagtacatcagtattgttggctggcttgatttttagtatgctagttcaaccatacttgtatgaattacaacatcgcattactactaagcaaaatgtattattgcttagcacattaactttgactggttttgcgactagtgcaggtacaatgatctttaacaagtcaatttatggcatttatttgatcttgtactttgcttggggaatgtttttagctaacgttaaaattcctaaaaaggtctttggctggtcaattgcagctggagtaatgtctttcttcgtaatgtttatcggtgttcccggatttaatggggtttactggtaccaacgattatctggtcgaagtggcgtttattcttggaatcctaaatttttaagtaatattgcttcaccatttttgttcttaatggttttagcagccttcttaatctttagaaaagtgattgttagctatagtgctaagcagatgcacttctttattccagtaattatttttatggacgctccaattattggtggttttgttaaatcgttccgctttaccaatagcgctggatttaacaagttcttgatgattgtcatcatgatgctagctgcctggggcttaagctggctatatgagcgctatttattcaaggtgaagccggttaaacggacggttgcttttttcaagcaacataataacttagcagaaattgttgaagatgcttggactaacttcactgcttggatagttgaaaatcgagtacgactacttacatggggctggttctatgtattaagttttgcttcattcttaattgaatcagataatctgcggatccaaattacgactgcaactgatatcaatgccgtaattttcttgctcgggactagattcttcgctattattttgacagcaatcttccttgatgcaatgtttgcaattttctacttcattactacgcgttactggacttcaacagttttagtaactgtaattacaattggttgggctattgccaacaagattaaattagatcttcgtggggaaccaatttatccaactgaattagacgaaattgttaactggaagaccttgatgccaatggtcggccaacaaaagataattatgatcgctattgccttagtaattatcattgcattgactgtctttcttgaaattaagtttccaattaagaaaaagggctcatggaaacgccgtggtatttgggcattgttgagtttgcttttgttcatgacaccagtgcgctttaaccacgatggcggaattatttatcacattaaccgtggctttgataataagcaatcgtttagaaaccctgaacgtgatattcaaattaacggtccattattgaacttcttgaattactttgacttgcagattatgaataagccaactaactattcaaaatctacaattcaacatttgaatgagaagtacagcaagatcgctaatgaaattaacaaaacaagaaagaatactctaaagaatcaaactattgtttacaacttgagtgaaagttttgttgatccatatactttcccaacaattaagattgatccaaaaactccaaacccagttaagtttatccaatcaatgaagaaacgtgccacatacggtagcatgcttagtgccggttacggtggtggtactgccaacatggaatgggaaactttgaccggattcaacatgggtatgttcaattcaactttgactccatatgtacaaatcgtaccaaactacgacttctacccaaccattggtatggacttcaactacaagtcagctgttcacccattcattggtacttactactcaagagtagaagactacaagagatttaagtttaacaagttcgtttaccttggttctaaatacaagatcattgatcaaaagaaacttggtaagagtacttacaactctgacttcactgcttatgctaacggtttgagacaaatcaacagcatgaagggtggtcaatttattaacttgatctcaattcaaaaccacatgccttacaacaactggtatccaaacaatgaatacatgggcaaggtatctggtgaactcttcaacactgccgctgttcgtgagcaaatggcaacttacatcaagggtacgcaatacaccaaccaagctgttaagaagtttattggtcaaattgataagatcaagaagccaattaccattgtcttctacggtgaccactacccaagtatcttgtcacaaaactacactggcaaatatcctgttcaaatgcactcaactcgctacttcatttactcaaacaagtacgcaagacaacacggtgctaagaacaagttgactcacaacactaacttcgtcaacactagtgacttcactgctatgatgcttgaacaaactaacactaaggtaactccttaccaagcacttttgactgaagttcacgagaagcttcctgcaattaccattaactttaatggtgacaaaggcttccaattggttgaccaaaagggtcactttgtagatcctaagaagttgacttcagaacaacaagctatattgaacgattacgaaatggttcaatatgatatgaccgctggtcaagcttatggcctaaaagctaagggcttttacaagatcggtgactaaataaaagagatcgaacgtaaagtgatacattccctgtcaagtagacagtagaattacataaagcttttattcctcagttgattaataatcagctgaggattttttggcttctcttattttcttttcgtgtattttttgccagtatttctcaattcgatgatttggtgcaatagggcaattcttaatattgcctttcatcgcttctttgcgcatttcaccagcagttaaaccgttaaaacgtttctgtggatcttcattaatgtagtaatctattgtcttacaaatagaatcattaagttcatcataactggccacttgaggatgaagaataactcgcatttctttgataatgccttgccagccttccattggaccattatcaatacagcagccaacacgagacattgattgcgtcatgccttggtcttctaattggttttggaaaggtgcgcgagtaaattgaaaaccacgatcactatggaaaagcggatgagcattagggtatgctttaacagcctgcttataggctgcttgaactaaagcagtatcgtttcgtttactaattgcgtagccaacaggatagcgatcatatagatcaaacacagtacatagatatgccttaggcaggttagcagcaacgacttcagtgatatctgtacaccatttttcattaggtctagatgcattaaagtctctttttaacttgttttcggccgttttctcaggcgttgtatgcttgaactttagcttctggtatctaggcttttgtgatctaatgccattgatacacatcaagcggtaaacagttttatgataaaccggcttttcatcagacatctgtcgattaactgccatggtcatcttttccgtcccaaacagactgttgttagacttagttatttcaatgatctttgcttcaatctttttgtctcgttcttcacgcttactcggcttgcgcttaggatcaaagtatttgtaataagctgagcgtgctattttagcccatttgcacattaaatcaatcttccaattgtacttttgatggcagtcatggattaactgatatgtttcttgtttccagcgtctttttattgcggcttgtctgtatcttggttgtccggcaagcacatcctttctaactgatctaatttttttaggaattcgttcttagtttgttcttctttgagctgacgctctaattccttaatttttcgattagccagttctaactcagttagctcttctggcttcttatgtctgcctcgtttatctgttaatcctgtttcaccattagctagatatttgtgtgtccagctgtaaacctgctggtaagaacaatcaaatttgacagctgtttgagtgtaattcttgtcgtgattaagacagtattgaacaatctgaattctttcttgctgggtagtttttcttcttgctttagtcatatagacctccggatggggatcatagtcccgattttctatatgactattatacttggaaacccattctgatactgttccattgcttctaatgccatatttattagctaaagaatgtaacgacattttgccagctaaatattcttgaacaaccttttctttaaatgccttagagtaatgattattgtattgagcattacttagaagggtatcacgattgctttgatattgatgaacccatcttcttacttgcatcgctccacttttacttggcatcttaagccgtttagctatttcaacgctgctcctattaccattcaagtattgttcaactgcccatatcttttgatcgaatgaatatttactttttctggacataaaaaatcccacctccatggataattgaatactttatgtatttaaatcgtccactttagtgggattgtatcaaagttcggtcttttttgtatccaatgataaaataagggctaagaggaataactgataattagctgatttaaaggtgattagaatgaaaaagataataacaatggcactagccagtgctgcactatttggatcttctgcaacaactgttcaagctgggacatataatcctaagaacattaccagttttaatattaataggcgtaactatgtagctaagggaaagatttataaactccatttacccgcagctggtagattagttactaatggcaatgttactttaaaaaatagtatggaatggacctgtattccttatggtaaggacaaaaatacgtattatctgcgtaaaggcacatattatttaactagttcaaagaatattagtgtgaagactacttatactcgtttaactaagatccgtaagaatttagaaacttacgttgaaacaaagaagaataatgacaacagtagtcttaaagctagaaagattgaaattggtcaagatattaaagcaatgggtgaagtgtacgattacgatagtgtcgactactacacatttactattgactcacctcaaatggttacgatgaggatgaccaataatccgatttatcagcttggaaaaggtaacattttcagcaagatgaatgtaatcatgttcagtgaaaataatccagttggcggtagtacgatgctttacccagagagtttcgaaattaatggcaataagattgctagtcaaagctggtacttgtctaaaggaaattatacttttagtgtaaatactcgtggactttataattttcaattaacggctgttcctgatacgcgtgtggtaccggcagatactgagatagaatctttacaaaacactaaggatggtgtggttgctaacttaagggatgcacgtcatgcgaagacttatgaacttgcatggcgtgaaaaaggctcaaaggcagctccattcacttctagtagcaatactacagaagtaagtactgcacctgctacacgttacatagacaaaaatgatcgtaaaatcccagtttcaattggtaaaaaattagttaatggtcaaagctactattttgtagctcgcggtgtaagcaatcctgattacattcgttacggcaatccggaaaaagataattattttggtgcttggagtaattcagtagaacacacttactatgcaccttcagatgcaacaccaggtgcagttgatttaaccactgctaaagctgacagtacttatcacaacattcatgtggcttggaataaaattgctagtgcacaaagttatcgcattgcctaccgccaaaaaggtacaaataagtggtactatgaagtaactgatcaggctactaacgcgattactggtattactagaaatagaaattatgaagtgaaattgcaagcattgaatggtgaaaaaactggtccatggtccgcaattaaaacaatttttgtaaaatagcggttgactaaaactatttttctcgttaatatcataactaacaaatgagtagcgagtcggctcagcgttcagagaactagcggttggtgtgagctagacaggccgatttcagcgaagtacttaatagggttgctcctttaccggcttgaataaggcgcagcagcgcaaacgtgggtggtaccacggctaataatgtaatttagtcgtcccttggtcttttgaccaggggacgttttttattggaggaaaaactatggcaaaatttgatattttggaagatttaaaatggcgtggtgccattaatcaagaaactgatgaggaaggtttgagaaagtacttagcagaacatgacgatttggcattgtactgcggtactgacccaactggtgattcccttcatattggacaccttattccattcatgatcttgaagagattccaaatggcgggctaccatccagtaattttaattggtggtggtactggtgcgattggtgacccatcaggccgtaagactgaacgtactttacaaactgcggaacaagttaagcacaatgaagaaagcttaactaatcaaatgaagaagttatttggtactgaaaattttgaaattagaaacaatgctgaatggctaagcaagcttaacttgatcgacttcttgcgtgattatggcaagttcttccaagttaacaatatgattaacaaggatgttgtagctagccgtcttgaaaatggtatttcatttactgaatttacttatcaaattttgcaagcaattgacttctaccacttgaataaagatgatggtgttcaacttcaaattggtggtagtgatcaatggggcaacattactgctggtattgatttaatccataagcttgaaggcgcggatcgtccagcctttggtttaactattccattgatgcttaaggctgatggtactaagtttggtaaatctgctggtggtgctgtttggcttgatccagaaaagactagtccttatgaattttaccaattctggattaatcaagatgaccgtgatgtggttaaatacttgaagtacttcactttccttagccgtgaagaaatcgaagatttagctgaaaagactgagaaagaaccttggaaacgtgctgcacaaaagaagctggctgaagaagttaccaagtttgttcatggcgaagcaggtcttgaagaagctaaaatgattactgatgccttgttctcgggcaatatcaagaacttatcagttgctcaaattgaacaaggcttgaagaatgctccaagtgcggaagctggcaatgaaaagaagaatattgttgatttcttagttgacactaagattgaaccttctaaacgtcaagctcgtgaagatgtaaagaatggtgccatttatgttaatggcgatcgtgagcaaagtactgatttcgaagttgatccatcaagtgactttgatggtaagtacgttattattcgtaaaggaaagagaaagtatactttagttacaattaaataattaaatatatgattttaacattttatatataaaaatagagggattttttcctctatttttttagctaataatcggagatatttactaccaactaatatttgtaaaagataatgatttgtgtaaaataatattttacttcttaaattgttattttattttctaaaatcaattgctacaatctatttattaagttattcacaaattcacattattactatacgatttactgcttcaagtgcaataccaacataaaatagctgcgtataccttttgcaaatgctgatgcaaagcacttgattaaaaaactgacttttaataaaaatatgtgaaaagcagcactatctactttacttataatcaaacagtgttatagtaatagtgtaaagagaaagtaagtaaatagaaagaggttattaaaatgttagaatctaaaaaagctattaagattatttcaagtttggtaatcggtttgagtttaggctgtgttcttactcctattgctcaagctacttcatttactgctcctaaattgggtactgcaacacaagctccaaccaatcctgctattaaaaagggtgataagatctttgttgttattaaagacaccaaaaatcaaaaagtagctgtttacaataaaaatgctgaaaaaactagcaaaaaagttgcaatgggttctacttataccgcaaaagacgttaagaaggttaataaaaagaagattgtcagaatcaacaagagtcaatggttgaatattaaagacgtcgttaagaactaaataaaagcaaatttaataaccgttttgaatacttattttctaaaaatacttggagagaataaataaggacgaggatgttcaaatgaatgtcttcgccttttttggtacaatgaagacgccgctttagctcaataggtagagcaccgccgtggtaaggaggaggtccccagttcaaacctgggaagcggcttagttgttgtttttggcaagaaaggaaaaattttatgaagcatgaacttacaatgaatgaaattgctaaatttcaaaaagaatatgagcaaaaaccgcaaaatcgggttgcggaattggctgttgttaataatggtgtggctaaggctagtttggattcagaaaaggttaggaaattgaaccgcactttttcaattgaaatcccaactgataatgttactgatcaaaagcaatcgggtcgctgctggctatttgcggccttgaatacattgcgtcatggttttgctaagaagtataatgctaaaaactttactttttcacaaaattatttattcttctgggatcgaattgaacgagcaaatattttctttgataatattttgaataccgcagatcgtccacttagtgacagaacagtgcatacttatatgcagggacctgatactgatggtggccaatgggctatggctgtttctttgattaggaagtacggcttagtgccaacctatgctcaagatgaaagtttcactgccaacaatactgctttcttcaatcgtattttgaataataagttgcgagaagatggacttgtgttgcgtaagttagctcaagcaggtaaaaatgatgaaattgaagctaaacgtcaagaatttttgagtgaggtttaccgtatggcagtaattgctttcggtcaaccagtacaaaaatttgaccttgagtttaaggatgatgaaggtaagtatcattttgatggtgatcttactccacttgatttctttcacgactactttactgatgacttggatgactatattgttttgttcaatgcaccagatcatgaatttgataagctgtatgctttgccatttgaagacaatgtagagggcggaagtccagttcatttcttaaacactaaaattgaaaatcttaaagaagctgcgattaagcaacttgaagcaggcgaaactttttggtttggttgtgatgtaggtaaagatagcgatcgtcaaaagggaattttagctcataacctctatcaaactgatgctatttttaatattgaaactaagttaagcaaaaaagagagactggaaactggtgcttcgggttcaactcatgccatgacgatggttggtgtggatgttgttaatggaaagccacgtcaatggaaaattgaaaactcatggggaaacaaggtcggtgaaaaaggctactttgtgatggatgataactggtttgatgaatatctcttcaaagtagttgttaaaaaacaatatgtaccggaaaaactggttaagatttgggaaggcaaagcaacgccggtaaaagcatgggactcaatggcataatggaaattaaacaagttatcgattttactcaaacacacttaaagaatgaaaaaacgggtcatgatttttatcatggcgaacgtgtagctaatttggctagtcaaatgtatttagcagatcatgctgatgctcatgaagatagccgggtagttgctattattaaaacagcgggttatttgcatgacacgattgatgaaaaaatatgtgctgacccacaaaaggtaattgatgaaattaaagttttattgccgcaagtagggtttaatgaactggaggcatgggatattttattcaccattcaacacatgtcattttcagctaatattgagcatcactatcatttgcctttatctggacaatatgtgcaagatgctgatcgtctagaaagtttgggtgcgattggaattgcccgtgcctttacgtatggtggtaaacatggcaataagatttacgatccagagattaagccagccgttttaactagtcatgatcaatatcgtaaccatgtcgaaaccacaatcaaccacttttatgagaaactttttcatttagaagatttaatgaatactcctgctgccaaaaaagaagcggaaagacgaactgcatacatgcgcgactttgtacgtgaatttatgcaagaatggaatgtttagaataatttaattttgaataagccttgatacatcagcattgaggcttattttttaaataaattaaaaataatattaaaaaaaacttgcaaagcaaaaaatatttagctatacttataaacaacttaaagagctctattaattttctcataaacgaggggagcaataatatgaagtttaccaagttattcgctgcaggagcaaccgttttgattgctggctcaacattagcagcatgtggtagtaattctaattcgtcaagttcatcagctaagaaaacaattaattggatggattcggctgaaattccaacgatggacatttctaaggcaacagacgttaccagttttaaccaattgggtaacgttgaagaaggtttataccgtttaggtaagaattctaaagttgagaatgctttggcaacagataccaaggtgtcaaaagatggtaagacctggactttcaccttgcgtgattctaagtggtctaatggtgataagttaacggctaaagactttgtttactcatggcgcagaaccgttaatccaaagacggcttcacaatatgcttacctcttcgaaggaattcataatgccactcagatttctgcaggtaaggcaccagttaatagtttgggagtaaaggctgaaggtgataataagttagttgttaccttagacaaacgaattccatactttaaattattgatgggattcccattgttcttcccacaaaaccaaaaggtggttgaagctaatggctctaagtatggtacttcatctaagactacagccttcaacggaccttttgtacaaaagggctggactggttctaacctttcttggaagcttgtgaaaaacaagaattactgggacaagaagaatgttaagcttgatgctattaattacagcgtgcaaaagacaccatcaacagcttacaacttgtaccaatcaaataagcttgatgctactattttagattcacaacaaactaagaacttaaaacatcaaaagggttacactttgcgtgatactgcagcaaccttctatttgcaatttaaccaaaagaagaagattttccaaaatgctgacttgcgtagagcaatctcaatgtcaatcaatagaaaggcactgggaagtgctttaggtggtgctaataccccagcaaccagtttaacttcaaagggtgtagttaaccatgatggtaaggactggtcagaagttgttggtgataagaagaacgccgcatataacccaactgaagctaagaaactttacaagaaggctttgaaggaattaggcgttaagaacgtttcatttacaatcctgtctgatgatactgattcaggtcaaaagacgactgaaacacttcaaagtcaattagaagaaaacttgaagggtatgaaggtttcagtagctaacgtaccattcaagactcgtttgaaccgttcaactagtggtaacttcgatgttgttgtttcaggttggtcagctgactttgccgatccaatttcattcgttgacttgtttactagcaagaatgcacaaaataacggtaagtggagtaactcccaatacgacaagttgatcgctgattctaagactacagcagatacaactaagcgttgggatgaccttgaaaaagcagaaaagatcttgcttagcgatgaaggaatcgccccactttactacaagactgaagcttggttagttcgtccagacattaagggcattgtctacaatggcgctggcttaaactacaacttcaagaatacttatgtagcaaattaattaaaaaatcaggaggacatagtaatgattattatttcagcaattattattttacaaacaagacataaaaataatctctcttcacttgtaattgcgtaataatagtctagctatgatttgatgaatagatagaaggagcaaccatgtgaaggttgctcctttttgtaataaaaaagaatgagggtcaaaatgaaaaagtggaaaaagtattttagtgcaagtttattaaccgtcgtatcagctgcaactttggcagcctgttcaaataaaagttcgtcatctggtaccaagcaaaccttgaattggatgactaaatcagaattacaaactttagatttgtccaaggtgactgatgcaactagtttagatcaaattaataattcgatggaaggactctatcgtttaggtaaaaattccaaggtggaaaatgctttggcaactaagactgaggtatcaaaggatggtaaagtgtggcattttactttgagaaagaatgccaaatggtctaatggtgatccagttactgctaaagatttcgtctattcatggcgtaggactgttgatccaaagactgcctcacaatatgcttatcttttctcaggagtaaagaatgcggatgatgtagtagcaggaaagaagaaggttgaaacactcggtgttaaagcagatgataaccaacatttaaccgttactttggatagaagaattccatactttaagctattgatgggcttcggggttttcttccctcaaaatgaacatgccgttgaaaagtatggcaaaaattatggtacctcatctaaaacaatggtttataacggaccatttgtatcaaaaggctggaccggttcaaacttgtcttggaagctagttaaaaataaagattactgggacaaaggcaaggtaaaactaagtaagattaattacagcgtgcaaaagacaccatcaactgactataacttgtatcaatctggaaaattagatgtagcattattggcaccacaagctacaaaacaattgaagaaccagagtggttatacaattagaccagcttcttcaacacaatatttacaattaaacgaaaagaacaagcttttccaaaatactgacttccgccgtgcactttcattatcggttaatcgtaaggcattagcttcagctgtaggtggtgctaacaagccagtcactaccttttcaccaaatagtatgactgaagtaaatggcaaagattatactgaattagtcaaaactgctgaaactgataagttaatgacatataaccctactttagctaaaagttattggaagaaagcacaaaaggctttaggacagagcaaagttaacttcactttgctaacctatgacgatgatgatgccaaaaaagcaggtgaatacttgcaaagtactattgagtcaaacttgaaaggcgttaatgtcagagtaaatagtttacctaaaaagactgccttagttcgtggtcaaaatggtaactttgatgctttactgatgggttggcaagctgactttactgatccaatctcattccttgacttgaacacctcaaatgcttcatacaactggggcaagtgggctaataaggaatatgataagtatgtagcagcttctaaaactactggaaacgaaaatactcgttttgaagacttagctaaggctgaacgtgtattgttaactgagcaaggtgtagtaccactttaccagccagcagaagcttggatggttcgtccaactgtcaagggcgttgtatataatggtgctggagctaactataacttcaaatatgcttatgttgaaaagtagactaaaatcctaaatatctaaataatagaacttataacaataaacaactcctctatgtaattaaaaagcagaccgaaaaaatcggtctgctttttgattttcgcttgaaaaaagcaagttaggctagtaaagtaaaactaataattttttgaatgagaaaaggagagcttaaatgtcaaattgggatacaaaattcgctaaaaaaggtttaacgtttgatgatgttttattaattccagcagaaagtcatgttttgccaaacgaagttgatttgagtacgactttggcggataacattaaattaaatattccattgatcagtgcagggatggatactgtaactgaaggtgcaatggcaattgcaatggctctccaaggtgggctaggcgttgtgcacaagaatatgtcaattcaagcgcaagctggtgaagtagccaacgtaaagagcgtagttgtgccaactagtgctgcaaaggccgcaactgatgatcaaaaccatctgctctgtgctgcagcagttggtgtaaccagtgatacttttgaaagagcagaagcattgcttgaagctggtgctgatgcgatcgttatcgatactgctcatggtcactcagctggggtattgcgcaagatcaaagaaatctgcgatcattttccagaagcaactttgattgctggtaatgttgcgactggggatgcaactagagcactgtttgatgctggtgttgatgtcgtcaaagttggtattggccctggatcaatttgtactactagagttgttgctggtgttggtgtgccacaaatcacggctatttatgatgctgctacagctgcacgtgaatatcacaagccaatcattgcagatggtggaattaaatattcaggtgatgttgttaaagctttagcagcgggtggcaatgctgtcatgcttggctcaatgctatcaggtactactgaagcacctggcgaaatttttgaagataatggcaagaagtataagcgctatcgcggaatggggtctgttggtgcgatggcccaagcacacggttcaagtgaccgttacttccaaggtggcgtaaacgaagctaataaacttgttccagaaggtgttgaagctcgagtagaatataagggcgatgtttctgatgtagtctttcaaattgatggtggtctccgttcaggtatgggatattgtggtgctgcaaatattccggaattaattgataaagctcaatttgttcaaatcactaatgcaggtttacgtgaatcacatccacatgatgttcaaatgaccaaagctgctccaaactatacaaaatagatataataaaagttaaaaataagagagaaagcaaaatttctctcttatttttttaattttttggacattttaactagatatatttatttcttttggtataattaaaacaacattaaaaagtaaatgaaagcataaaataaaatgagggagcaattaatatggctagatacctattaaaacgtatattttatatgatcctcactttgcttatcgtggctacggtaacttttttcttaatgaaattgatgccgggttcaccttatgctaatgaagcaaagatgacgctaactcagcggcaaattatggatcaacagtatggtttaaataaacctatctggcaacaatatttgatttatattgcggggatgcttcacggtgattttgggacatccttccaatatagtaaccaaccggtagcttcattaattggggcgcgtttgggtgcgtcagtacaattaggtttacaagcattaattttgggagttgtccttggtgtaatcgctggggcaattgctgctatgagacagggtacttgggttgactcaactgctactgtaatttctattttgggtaaatcagttcctaactttgttttagcagttttgcttcaatactacatcggtttaaagctaggttggttcccaattgctggttgggggcaattttctcaaacgattatgccaacgattgctttggcagttggaccatttgcggaaacagctcggtttatccgaaccagtatggttgataccttaagtagtgactatattgagttaggtaaggccaagggcttaagtagaatggaagtcattagaaaacatgcaatgcgtaattcaatgattccattagtaactctgattggtccttatgctgtagccttgatgactggttcaatggttattgaaaatatctttaacgttcctgggattggtgaacaatttgttaagtcgattttgactaacgactatccaacaatcatgggaattacgatggtttactgtattggattagtagtaattctgttgattactgatattgtttatggattaattgatccaagaattagattagatgaaagcgaggcctagaagacaatatgactgaagaaaaattaaaccttcctgcagatgcctttgaacccttatcaaaagatgaagcacaggataacgaaaacattgcaggtccatctttatcgtttgcacaaaatgtttggcttcgcttcaagcagagaaaagcagctattatttctgcaattattgttattttgatgattgtagtagcttttggttcaaccccattcatcaataaatctactttagttaaatcgcacccacaatatgccaatttacctgctaaagtgccaggaatgagcgcaattaacgggttgaacggtaagattaagcaaaatggcaagtgggttgatgcttatgcccagaatggcgtgcctaaagataagtattttatcgcaggtacagattatttaggcagatctttgggacaaagaattatctatggtacaaagatttcattgatcgtcgctttagttgcagctttctttgatttaactatcggagtcgcgtacggaatagtgtccggctggaaaggcgggggagtcgataacgtaatgcagcgaattatcgaaattatctcttccgtgcctaatttaatcattgtagttttgatgttggtggtattaaaaccaggtattaagtcaattatcttggcaattgctatttcaagttggacgacaatggcacggcaagttagagcagaaactctgagtttgaaaaatgaagaatatgttttggcagctagatcattaggtgaatcaccttggaaaattgcttggaaacacttagtgccaaacctttcaagcatcatcattattcaaacgatgtatactattccaactgccatcttcttcgaagccttcttaagtttcatcggaatcggtatttcagccccagaaacttcactaggtgtacttttgaacgaaggacaaaagaattttcaattcttgccatatcagatgtggtatccagcaatcgtattgtgtgtgttgatgattgcctttaacttattaggtgatggtttgcgtgatgccttcgatccacggggacaaagatagaaaggattaacctaaatgccagaagaaagagttttagatgttaaaaatttaaaaattgatttccacacttatgctggtgaggttaaagctattcgtaacgtttcctttcacctaaataagggagagacgctcgcaattgtaggagaatcaggttcaggtaagtcggttactaccagaagtattatcggtctgttagcacgaaatgctcagattgaagacggtgagattgatttccacggcaaaaatttgctagagttatctgaaaaagaaatgcaaaaaattcgtggtaacgaaatttcgatgattttccaggatccaatgacttcgcttgacccaactatgaagattgggcagcaaattgcggagccattaatcaaacataagggtgcctctaagaaagaagcttgggctaaagccttggaaatgatgaaggccgtgggaatcccaaatgcagaagaacgaattaatcaatatcctcaccagttttcaggtgggatgagacaaagaatcgtaattgcgattgctttaatttgtgagccagagattttgctggctgatgaaccaactacagctctagacgtgactgtccaagctgaaatcttggacttgatgaaagacttgcaaaagcgggttaagacctcaattattttcattacgcacgacttgggcgtggtggccggtatggcagatagagtagctgtaatgtacgctggtgaattcttagaattcggtggtgttgatgaaattttttatgatccacagcatccatatacttggggcttaatcaattcaatgcctactttaaacagtgatactttggagtcgattccaggtacgcctcctaacttgcttgatccgcccaagggtgatccttttgcaccaagaaataagtatgccatgaagattgatgtggaaagaaagccacgatttttcaaggtaactgatactcactatgctgcaacctggcttttagcaccaggtgcacctaaagtggaaccaccagctgaaattacacgtcgctggaaaaaatataacttgatgaaacaagaagataaactgccagaggttaactagtcgcggtaaaggagatttttatgccagaaaaaaagaaaattttggaagtaaaacatctaaaacaatactttaaaaatggtcgtaatgtcaccaaggctgttgacgatgtaagctttaatatctatgaaggtgaaactttcggcttggtaggtgaatctggttctggtaagacaactactgggcgctcaattttgcaattgtataagccaactagtggcgaagtgatttttgaaggcaaaaatgtagcagatttaaaaagtcgtgcagacaaactagcttttacacgggatgcacaaatgatctttcaagatccttatgcttcacttaatcctagaatgactgttgaggacattattgctgaaggattagatattcaccatttggttaaaaataaagatgaacgaactgagagagtagaggaattattggaaactgttggcttaaatgcaagtcatgctagccgttttccacatgaattctcaggtggtcagcgtcaaagaatcgggattgctcgcgccttagccgtagagcccaaatttattgttgcagacgaacctatttcagctctagacgtatcaattcaagctcaagtagttaacttgatgattgaattacagaaaaagcgtggtttaacttacttgttcattgcccacgatttatcaatggttaagtttatttctgaccgaattggtgtaatgcactacggtaaactactggaagtaggtccagccgatgacgtctatgatcgaccacttcatgattacacgaagagtttgatttctgcagtgccaattcctgatccagaagttgagcggagccggacaaggattccttatgacgctcaaaaagaagaaatggacggaaagcaacgctcaatgcatgaaattcgtccaggacacttcgtacgctgctctgacgatgaagtcaagcattacgaagaagtagcggcaagctacgaaaattagataccaaatctaatgcaactctctctatattaatattatatttatgctaaaaaggcgatccgatatggatcgcctttttatatgatcattgctcgttaagctaatgaatcccatgctggtaggtcagtgattggaccttcagcgagcttcttttggttttcagttaagtacttcttgtggactacaacttcgtaaacatagtccttaaaccattcattattcatgacgtagaagcctttaacaccagatttatcgccccatgagttctcaactttccattgacgaacttcgccgttgtcttcatcaacaccaactaaagtcatggcatgtgacacttgaccgacgccggtctttaatctgtctgctttagacattttaaggtcaacgccgaataagtcatctaacttgtacaaattagtgtcaaggtaaccagttttacggtccatttgacgtaaaacatcgttaccaaaccaaacagcttcgccgtcttttaattgagcgatagcagcgctggacaagtattccattggtacattcaaaagcttgattctcagtgagccttcaatgttgtcttcagctggtagaccataaagcttgttatagtcatggtctggagcattggttaaaacaacatagtcatcaaaatcaacgtcgcccatgtacttgtgtaaaaactcaagtggagttaggttcttttctaaatgatatttcttgtcgtcatcacgatattcaagatcgaaagtcttaggtggttcacctactgcgatagcagtcatttggtaaacttcgcttaaaaatttttcgcgaacctttttaatttcatcatctttgccgtattgcttcaagtggcgcaatactaaagcatccttctttaacttatcgcccaaagcagtagcaaaaccagttgtatcattggtgttaaaagtttctggcattgcatatgaaggaacaacaccatatttttcaactaaagcggcagccatttggaattgtccaccatcactaccagcaaagtctaagtcagccttaacttgacgtgaatcaagtggcatgtcagcactgtctaagattctgttgtagaacatgttagcacgttcgatcttatcccagaagaagttgtaagcttgtgagaaggtgaagtccttagccttatatttcttaccaaaagcgtggcgcaaaacgttcaaagtcgcaaacagccagcaacgaccagaatgtttttggttagtgacattatttgtatcaagttcagttgaaaagacgcgggttaattgtccttgaacacgatcattataagatgcttcaagtacaccactgcgttgagctgcacgagcaacgactttattttcaggttttttattaaattcggcagagaacttttctagttcctgcacagttaattcatgagccataaaaaatctccttttcattttataatttttttctcaatttaattctattttaaagcaaaacaaaagcgggttcaatcagaactcgcttgagagaattattaatccgtcaacttattagatttcttgcctatatctaataaattaatcaatttggatagaattgccatcattgccagcagtttcctttggcaaagtgatggtcaatacaccattatcatactttgcatgaatctcacttgcaactacatttggtaatctatagcttctagaaatactgccctcacttctttccttatgaatgatatttctatttttatcgctagtgtccttaaatgattttcttgtgccgctgacatttaacgtaccgtcattatagttaacgttgatatcctgcttatccatgccaggcatgtcaatcttaactagatagtccttatcagtttctgcaacatcagattgcataatgttttcaatttcattatcgtcaaagaagtttcttggaaaaccaaaccaatcattcattgcatccatcatgtcgttgcgccgattcatcatattgtttgccataaataaaacttcctttcatttttgtatttgcttaattagaatataaggaaaagatcaactcatttcttgatctcttttctccttacactgtttattgtagtcgctttttatagaaatgacacaaattagcactcaaaaatttatagtgctaattttagactgataacgctgctacaataacattctgagattgtagataattattacgtatagaaaaataaagaaagtttgtgaaatagaaatggtatattttcagaaaatgacaccagaaggctatcaacaaattgaggatgaaattgctcgattaaaaaaagatcggccacgtagaattaaaattttgcaggctgcacgagctttaggtgatctttcggaaaatactgaatatactgaagcaaaacgtgatctaggtcacttacaaagtcgtctgcgttacctaggcaaacaattaaagtatgccgaaattgttaaagctgaagatgatggtaaggttgatctaggaaagaccgttgtgcttaagtttgatgacgatgatgaaacagaagaatacaaagtagttgggcgaatggaagcggatcttgctgctggcaaggtttcttttgattctccattgggtcaagcaatcatgaaaaaggaggctggtacaacagcaacggtggctgcaccagcaggtgaatatcaagtaacgattgtggaagttaaataagttgagaactataataaactgtctttttctggtataatatgggttttgtgggatacaattcagagtaggagtgaagaatttgaatacgccacaatcaagagagggtaatgtgatccgctatgccgtttatttagctggctatgtcgctgtgtttgcagtagtaaagctagttactagaaaatctccggctcatatttgggatttgattttattcggcttagttgcagccatgattctgttgttttatgtttatcgtttcaatcgagagcaacgcttttttgcccgtgattttaaacttccatggttgggcagtttgtcaactgttgttctattaacattagtgattacagttacacagatttcgatttcatacttacaatcatatggcaggattagtcattatgatttccaattgatatatgccaaaagtgaatcagttaacatgttttggtttttaatcgttgtccaaggaattgtattaccaatcctacaagaatttttggcgactggctttttgttcaattatgcttttcggcgaaatactaagcaagttgcaattatggggatcattgtttcaggtctgatttatagcttactgagctttcaaaattcagtagtactgtttattattgatgcaatttatggcatggtgtttgcttggagctatatgtacacacaaacattattgatgccaatttacttagctgtagttagtggcgtacttacagtgattatgatttaaaaacaaaaggatgagaaaaattctcatccttatttttgtataaaaaaagcggatagcgtgaatcgaacccgcatctacagcttgggaagctgtcgttctaccatttaactatacccgcaatatgtttttattttagcattttttctatttgaagatcaacacttttacgatcaattaagctggtaaaattttgaaaaagccagcggcgtagttcgttgggcataacaactagaggcattctattatggattggcgccatatctttgttaggcgcggtagtaaccattgaaaaataatcctgatcataaatacctgcaattaaggtaagtggttgattagtgcggaaggcgtagctatcatggtatttacgaccgttttcagcaatatgggtagttttagcatattcaaagaatttttcggttaagattaagcaacgttgcttggcaaaggatttgtcccacattgaaggcgctgaatcataaaatcgctcaattctagcgttaaataatggcttttttggatcaacgggacttggatagccccattttttgttgtttaattgcaattgaccattttgataaagcaaaacaggtgctacttggttaggaaaaatatcttgtgcttgaatgtcaaaatttggtgtaactaagggcaggtcaagatcgcttttgagatattgttgaatttgttttaaattaggtaaacgaaactggttgcacatacgcatttcctttctttagggctagtttaatcatagcctattttttgttaaaattaggtaattaaacaattaatattaataaaaaaataaacttaaaaattagaaaagagcaaaaagatggcgaaagaaattttattaactggtgaccgtcctactggtaagctgcacattggtcactatatcggttcattaaagaatagagtaaaattacaaaattcaggtaaatatgatccatatattatgattgcggatacacaggctttgaccgacaatgctcgtaatccggaaaaaattcgcaatagtttgatccaagtagctttagattacttagctgttggtattgatccagctaaatcaactatttatgttcaatcacaaattcctgctctatttgaattgactgcttactacatggatttagtaactgtggctcggcttgaaagaaatccaactgttaagacagaaattaagcaaaaagatttcaaagactctattccaattggctttttaaactatccagtttctcaagctgctgatatcaccgcttttaaagcaaacgttattcctgttggagatgaccaggaaccaatgttggaacaaacacgtgaaatcgttaggacttttaaccgtgtttataattgtgatgttttggttgaacctaaaggttatttcccacctaaaggtcaaggacgtttgccaggacttgatggtaatgcgaagatgtcgaagtcacttggcaatgcgatttatcttgctgatgatgcaaagacagttcaaaagaaagttatgtcaatgtacacggatcctaaccatattcacgttgaagaccctggtaaggttgaaggtaacactgtctttacatatcttgatgtcttcgatccagataaggacaaggtggcagaacttaaggcagaataccaaaagggtggcttaggtgacgttaagattaagcgttacttaaacaaggtccttgaagcagagcttgcaccaattcgtgaacgtcgcgaaaagtttgctcaagatgaagatgcggtttatgaaatgcttctggaaggttcaaaaaaggctaataaagtggctaatgcaacacttgaacaagtccgtgacgcaattggtttgaactatttcaagaatagataaggctgaggtaaagttatgcacgatcgaattccttggaaacaatattttatgatgcaggcgctagtaattgcgcaacgctctacttgtaatcgcgcattagttggtagcgtcttagtaaaaaataatcggattattggcactggttataatggttccgtttcaggacaaccgcattgtgacgatgtgggtcatcaaatggttgatggtcactgcgttagaactattcattcagaaatgaatgcgatcattcagtgtgctaagtttggtgtttctacagaaaatactgagatttatgtgacacattttccttgctataattgctgcaaatccttgttgcaggcaggcgtgaaaaaaattaactattattttgactatcgcgataatccattggcgatgcaactacttcatgatagcggggtgccttatgaacagattaagattaatcgcaaatacgtggaaagcttggcccataaacttgaagaagacgagaattaatttaatttggttaatgggactagtaactgtatttttaataacgacaggatttgtccagccaaatattgaagatcatgctcatattttagataaagaaactcgcactttgattacggaaaaaaataatcgctattttcagactaaagaacaaccgcaaattgtcgttataacggttaaaaggctgaataagttaacacctaagatgctagatcattctaagcgaacggtctttattgtggtaggacagaaaggtaaaaagcgtaatgtgcaaatttattcaactaaagatttgcatagtgccttcaccgaggtcgctcggggcaatatcttgcgtgctgaagtagataaattgcgtagtcaaaataatgcaacttttaacaagggaattcgcttcgtctttcgggcatgtgcgactagagttgatcaacaatatcaatatgcacttgataaatatgatttgacgcaagcagaacaaaataaagtcgcgcgtccacatagtgtagctttaccaatcgcactggcactggcatttttaattacgggaattacttatttcttgcgtagatttagtcatcgtgatccaatttctaagaaatagtcggcttgacttatttgcattttgtccttacactttttatagacataattagcgaaaaactgttaggtgaaactcctacgtgaacacacgctatcgcccagaaacatccagagatgccaacgggttaaataggtgtcgtcgacttaaggcgagatccagatagctagcatgtgcttacgtcacgtagtgttaaaactgaacgacgagtatgacagagccttgtttggcaaaagtcacctgcagagttacaggtggcttttttgttttgcttgtcccaattaaagaagggagcaaataatgttaaaagcagctagcaagaagcgatcgaatatagacattcaaaggattcaacggattgcgcgtgagtcacgtagcgagacgctggcgcgtttacaggcgagtgctgaagggctttcgactaataaggctgaagaaaacagaagagaatatggcaaaaacgaaatcattactaatagcaattcctctaaatggcgcttattatgggaatcaatcgctacgccatttacgttggttttattagtattaactttattaaccctgtttactagctatattttggtgccacaaggagataatgacttaattactacgatagtgatgatcgtgatgttgattatctcggttctcgtcaattttatccaaaaaatcagaattgctaaggtaactgatcaattactcaatatggtatcagttacaacgaatatccggcgtgatggcaaaaatgtggaattgccaacagatgaagtagtggttggtgatgtaattaacttgtcggctggtgatatgattccagcggatatgaagttgttaactagcaaagatcttttttgctcatcaagctatttagatggggatcctgagccggcagaaaagatggctaatgtagtaattaagccgagtatggctaatgattatttgaactaccctaatattctatatgagggaacaactattgtttcaggctctggcaccgggattgtttttgcaattggcaatcacactgtttttggcaaagcagttcaggctatttcccgtaaaaaagtaaaaactaccctgtttgaccgggaaatgaagcaattagctaaaatattgattatcgcgacagcaattgtgattccgcttttgtttgtgattaatggcctgactaaggggaattggggggaaagcttaattttcgctttgacagcggcagttggcttaacaccagaagtgttgccgattattgttaattccaatttaacacggggcgcacgggaaatatcccaaaatggtgctgtcgttaagcaaatgaatgctattcaaaatttgggctcaactgatgtgttctgtatcgataaaaccgggactttgacacaaaatcaagtggttttagagcgtcactatgatttagatatgcaagaaaccccacagattttgaagttttcatatttgaatgcatattatcaaactggggtaaaagatttaatcgataaggcggtaattgatgccgcgggcgatgaactagatgtaaacgaaattcagcgtgattacaataaaattgacgaaattccctttgactacactcgaaaaagaatgagcgtggtagtggtagataacgatgaacaccacgggcagcacttattagtaactaaaggtgccgctgaagggatgctggcaatttctaataaggttgaacttaatggcaaggttgaggatttaactactgcctggcgagaaaagatcttaaatcagattaatgaattaaacgatgacggtttacgggtacttttagtaggttataaattaaatcctgccccagtaggtgagttctctgctaaagatgaacatgatttaaccattattggctatttggcttatcttgatccgccaaaagaaacaactaaagaagcgctggaagatcttaaaaaagattatgttgatgtcaagatttttactggtgataacgaagcagttactcgtgctattgctttgcaggtgggattaaacgttgatactgtttatgacggcacccagatcgaagcggttagcccggaagagttgcgtgaaattgttgaaaaatgcgatatatttgtgcgaataaccccggaattaagagtaaaaattattaatgcactcaaagcaaacggtcatacagtcggttatatggggaatggcaataaagacgctttagcaatgaaggtagctgatgtgaccgtaacttcgaatacgtcagttgatattatcaaagagtcagccgatattatttttgagcaaaaagatttgcagctgttagaagaaatgattctaatgggccgaaaagtcttttcaaatacaatgaaatatattaagaccttcttggtaactaacgctggtagtgtaattgcgatggttgtttcatcgctgctcttgccatttttgcctcttttgccattgcaagttttaattttaaatttgctgtttagcataagttgtctggttattccctttgatagtgtttctaaaaactatgtcaaaaagccacaaaaatggtcgattaagagatggccgaagtttgtacttaattttggtccgattctagcaattattgattttatcgcaatgggcttgatgttttatgtgatttgtccatatttagtagggtctaattatcatcattgggtctttatgacactattttattcggggatttttgtggaatcgctttggacaagaattatggtgattcacactttgcgtgatgaacgttttccattctttaagcaacatgccacgccagtggtgttcttggtgaccattggtatggcaattattggtacaatgttgccttcatcaagtatcgcgccaagtttgggcctagctcaattgccgtttggttattggggcatagtcttcttgctagaagtaatctacattttactgacgactttggttaagcacttatatttaaaaaaagaaaaattctgatttgaattaaaaggaattgctggttttagcccaattcctttttttgcatgttaaaataaaatagatattttagacgattaaaggagtttgattaatcaatggctgataaagatactttttatattacaaccccaatttactatccatctggtcgcttaacgatcggtaatgcttatactactattgcagctgatacaatggctcgttacaagcgcagtcaaggctacgatactttctttttaactggtactgatgaacacggcttaaagattgaacaaaaagctgaagcacaaggaattaagccacaagagttcgtcgacaagatggcggcttcttacaagaaattatggaagagtctcaatatttcttacgataagtttattagaacaactgacaaagagcacgtagctgccgtacaaaagatttttgaaaaattattagcaaaaggtgacatctacctaggcgaatatactggctggtactcagttgaagatgaagaatactttactgaatcacagcttgctgaagtttacaaagatgatgatggtaatgtaatcggcggtaaggctccaagtggtcatgaagtacgtttggttaaggaaccatcctacttcttcaagatgagcaagtatgctgaccgtttggtggaatactacaaggaacatcctgaatttattttgcctcattcacgtgaaaaggaaatgcttaataacttcattaagccaggtttggaagatttatcagttacccggactactgttaactggggaattcctgttctaagtgatcctaaacacgtggtttacgtttggatcgatgcactttcaaactatattaccgctttgggctatggttcagacgatgattcattgtttaagaaatattggcctgcagacgttcacttggtaggtaaggaaattgttcgtttccacactatttattggccaattatgttaatggctcttgatttgccacttcctaagcacattatcggccatggttgggtattgatgaaaaatggcaagatgtctaagtcaaagggaaatgccgtttatccagaatcattgactagtcgttatggtgttgatccacttcgctattacttgatgcgtgctcttccatttggcgatgacggtatttttacaccagaagactttgttgaaagaattaattatgacttggccaacgatttgggtaacttacttaacagaaccgtgtcaatgattaatcaatatcaagctggtcatgttgatgcagttcccgttgctcaagctgaatttggcaaagacttgcaagatacagctgctagtgtcattaatgattatcgcgaaaatatggattcacttcacttttcaaaggcattagacaatatttggaagttggtttctcgtgctaacaagtatattgatgaaactactccatgggctttgaacaaagaaggtaaaaaggaagaacttagcaaggtcatgagcaatttggctgaaagcttgcgtttaattgctattatgattgaaccagtaatgaccgaaactgcaccaattatgttcaagcaacttggtttaaattgggacaatgaagacgctaagcatttggcctttggtgactttgattgggatgttaaagtaattgaaaaaccacaaccaattttcccaagacttaagatggacgaagaagttaagtacatcaaggatgaaatggctaaagctaagccaaagaagaccactagaagtgaacaaaagaagggtgacgaaatcaccattgacgattttgacaaggttaagatccaagtaggccaaattttgtcagttgaaccagttaaaggctcaagcaagttgctcatgttcaagctggactttggtaatggcaaggaaacccaaattttgagtggtatccgcaagttttatccagatgcaagtgagctattagacaaaaaggttttagctgttactaacttaaagccacgtaagatgctgggtcaccttagtgaagggatgctcttatcaagtgaaaagcatggcaaaattaagttagctcttgttggtgatgaacatgcagttggggctgaactcggctaatggagatcattgataatcatactcatttgaatgacgagccgtttcgcggcaaggaacaatattatttagaacgagcaaaagcacttgatgtaaccaaggttatttgtgcggggcaagatcctgactttaatcaaagagcggttgacttagcacaaaggtttgataatgtctatgcgatggtcggttactgtcccgatgtggctaaagactatgatcaacaggctgaagataaactaattgaacaattgaagcagcctaaggtagttgcaatgggcgaaatcgggctagattattattgggatgaatcgccgcgcgacgtacagcgtaatgtttttgcgcggcaaattgaagtagcacatgacttgaagatgccagttgatatccatactagggatgcatttggagattgttataacatcttgaaaaatagcaatctggaatatggtgctgttttgcatagttttaacggtggtgttgactggttaaataagtttttggatttgaatgtttacttttcatattcaggtgttgtttctttcactaaggctacggaagtacacgagagtgcaaaagctgcgccacttgaccgaattttagttgaaaccgacgcgccatatttaacgcctaagccatatcgtggtcatcaaaatgaaactggctacgtacgttatgtggcagaagcaattgctaagttgaaggatattccactagagaaagtggcggatgctacttataagaacacagtgagagtttatgggcttaaataaaaagaattttgatgcggtaatcgttgttgaggggaaagacgataccatccgtttaaaacaatttttcccaggaatcgagacaattgagactaatggatcagccgtttcagatgaagtattgaagcaaatccaaaaattaagtgagagtcggcaaattattgtctttactgatcctgactttaatggcgaaagaatccggcgcattgtaactaaagctgttcctgatgcaaagcaagcttttattacccgtaaggaaggcgaacctcataaaaaggggagtctaggtgtagaacatgcttcaaaagaagcacttgagcatgcactaagtgatttgcatgaggttgaaccgcaaaaaagtgatttaactccagcaatttatcggcaattaggtttagctggtggtagcggctcacgaaaattacgtgaacaagtaggcattaaattacgagttggctatggcaattccaagcagttttataatcgcttgcatacttttggcgtttcattagctgaattaaaggcagctgtcaaggaggtagaaaatgacaaataatattccaattggctctccagttagaacacaagcaattgttaaccgttactttgtcaaagctaaaaagaacttagggcaaaatttcttagttgatcagactgctattttaggtattgttgaagctgctgggataaaaaaagatgatcaagtcattgaaattggaccaggtattggctctttgactgagcaactactgttggcaggtgctaaagtttttgcttatgaagttgatgatagcttacctacgattttacagaatgaactgcctaagaaaattgatgatcagcctttggctagtcgctttaagctgatcttgaaagatgtattaaaagcggactttaaggtagatattagtgacttctttgattttactaagccaattaaagttgtagctaacttgccgtattacatcactacgccaatcatttttgccttagctgaatcagatttgcactttacttcattgaccttaatgatgcaaaaagaagtagcagaacgattagaagcccaaccaggcagcaaggaatacggtccgttgactatttccgttcagaccgaaatgaatgttaaacttgctttgcaggtgagtcataattcctttatgccgcgaccaaaagtagactcgagcgtagttgtcttaacgccactgaaggaaaagccagcaattgaaaatcgtaagcattttatttgggtagtgaaaatgtgtttttcacaaagaagaaagacactcaataataatttaaaagctttgttgcctgataaaactaagcgtgatgaattatttgcggaattaggggtaaatccaagaattcgccctgaagaattaacaattaaacaatttattaaaattgctagctttattcctgcaagatgatgtataatattgaatttattatatatttgtgataaaatgttgctaaaggagctgttgtttagtgccaacatcaattatcacaattaaacataagttggattctcacttaggtgatactttaacagtagtagctcaagcgggtcgtaagaaagttactaagagacggggaattctaagagagactttccctgcagtgtttgtggttgatttagaccaacatcaaaataattttaaacatgtttcttacagttataccgatttactaactaagaatattgcattagagtttgatgatgaagctgaagaggctgaagcttaaacacaatttttgaaattgtcactagcatttatttaaaatgttagtgcttttttttgccctttagagtatattaattaagtataaaccaaacattagaaaggagatttcatgaaacgttcagaaagattggtggacatgaccaaatatttaatggagcgtccccatactttaattgcactaccattctttgctaagcgttacggcgctgctaagtcatctatttcagaagatttagctattttgaagcacactcttgccagcaatcaagatggtattttggagactgtagccggtgcagctggtggcgtgcgctatattccatttttaggtaaaaaacacgcggaagcatatttgtcagatttatcaactaggattgaggatccaagtagaattttagccggtggttttgtgtatctgtcagatattttaggcaatacgcaagatttacgtaaaattggtgaattagtagctactcattatgcttatgaagaaatcgatgctgtcatgacagttgaaacaaaagggattgctttagccaaagcagttgctcgttttttagatgtaccatttgttacagctagaaagcgatcaaaggtaacagaaggtgctactgtttctgttaactatatttcttcatcgttgtctcgagtatcgaagatggaattaccgactcgtgctcttaaaaaagaagctaaagttttaattgtcgatgattttatgaagggtggcggtaccctaaccggaatggaagaattagttaaggaattcgatggtactattgccggcgtttgtgtactctgtgaagccgattttgacaaagaaaagctgattaagaactatctttcattagtaaaaattagtgaaattgatactgcccaaaagctgattgtagcagaacctggtaacttcttaactgaaactgattttgaccgtttctaaaatggtatactagaatcaagttttgattattaagaggttaatattaatggaaaaatatgtagttgttcttgccgcaggtaagggcacacgaatgaagtcaaagttgtacaaggttttacacaaagtttgtggtaaaaccatggttgagcatgttgttgatgcagctcaaggcgttaatcctgcagaaatcgttacaatcgttggtacaggtgctggcgatgtagaaaaagtactggcagacaagtctaagtttgctttccaagaaaagcaattaggtactggtgacgccgtaatgactgcgcgtgaagaattgggtgacaatgatggtgctactttagtagttactggtgatacaccacttttcacaactgatacatttaatgaactattcaagtatcatgcagaaaaaggcaatgctgcaactgtattgaccgcggaagctccaaatccatttggctatggtcgaattattcgtgatgatcaaggcaatgttttacgaattgtagaacaaaaagatggtaaaccagaagaattaaaagtaaaagaaatcaatactggtgtattttgctttgacaataaaaaattatttgaagcattgaagcacgttaataatgacaatgctcaaggtgaatattacttaactgatgttttagaaatcttgcgcaatagtggtgaacgcgttggtgcttacaagatgcctgactttagtgaaagccttggcgttaatgaccgtattgcattagctcaagctactaagactatgcaaagaagaattaatgaacagcatatgcgtgatggtgtttcatttatcgaccctgatactgcttatattgatgcagatgttaagattggcaacgacactgtaattgaaggtaatgttgtgattaaaggaaacaccgaaattggtagtgattgctacattactagtggttcaagaatcgttgattctaagattggtaataatgtcactgttacttcttcaactgttgaagaagctgaaatggacgataatactgacatcggtcctaattcacaccttcgtcctaaggcaattattcgcaaaggtgcacatattggtaactttgtggaaattaagaaggctgagattggtgaaaatactaaagtaggtcacttgacttatgttggagacgctaccttaggtaaagacattaacattggctgtggtacgatcttctctaattacgatggtgtaaagaagttccatactaatgttggtgatcatgcctttattggtgctggctcaacattgattgctccaattaatgttgcagatcacgcctttattgcagctgataccactgttactaaggacgttaataaatatgacatggcaattggccgtggccgtcaagttaataagccagattattggcataagcttcctctttctcaagataaagaatgggattaagaataaggcactagtgtatcaagctagtgcttttttgttaagaattgctaaatacttattgcaaaataataattgagacctacaataaggtgtactaataataatttttacatgagtcatgtggtaataagtcaaatgaaaggcgatgatatttgttctttttgatcataaatttgagtatatgaaactaagccttggtaaaggttgattttttaaatgttaaacttttgtttacttttaaatttagaccaatttttgaaattaagacctcggtgtcctgtacagtttgtcatctttgagcaatttaaagataactcgtactaattttcttgcagttaatgtgcaagcacgtttatgcggcgagtagacagcttcatcatacttcttttggtaatattttttgaaaacaggatcatgtaatcttgctagattggcagcttcaatcaagtaatatcttagatatctgtttccagtcctggccattggagtatgttcgttgctgtgatctcccgattgatattgattccaggttaggccggcatacttagccagctgttcttctttatcaaagcgatcgatacttccgatctcagcgataataccagctgtataggttttgccaataccgggaattgattccagaattttgctttctggtaatgcatcaacgatacgatcaattgctttttctagatctttaatagattcattaaagctttgaatcatgttgtaatgaacagaaagcactgcatcaattgaatcagtcattactttgcctaagcgatatgaacctctaacagctttcttaattgctttagccaaggtatctggatcggaaaagcgtcctctgcctttaacctgtaagtaagaaattaagtcttcggtaggcatatccgcgatctcatccagagttttactatcggttacaatagacatcattgtagcaccgaaaagaggagtattaatcttatctttatcgacagtgattagtttattaacccgataatataaagcttcaatgaagtgctgtttggtacgagtcagttcttgaactaattcatatctggtacgcgttaaacgctctaaagcaagatagttgtcttgtctggcaatgcttactcgataatgtccaaagcttagatacaaagcaatgtaataagcatcgagaggatcagttttactttcttcaaagactttatgaaacctgctggtttctttggggttaattacatcagtctctacattgagcttttgtaaatcttcgtcattttggaaaaagtaagcaggatgaaaactgtaaatagatgtagcttccatgccaataatgatttgatcatagtgtttattttgagctagatctaaaatttgttttttcagttcactagcaccataaagatcattgacaaagctatcgttaattaagcgtttgttttgatcttctgaatcaagtgcaacgacctgtaaatctttagaactaacatcaataccgacaaataatttcattggaaatggcctcctttctttcaaatttctgatcatagattttgatcttcacatgttaacccctaattacagttcttaagttcaatctcgccagtataagtattcactggttgcttctttgaaagctgcacctaatcccaattgctcaaggactagcaaaaagaagcaatcaatacagcatgtgagttagagcataaaggaactgtctgggtggcagacttataaagcagacaaaactgcaggaggtgataacctagaccagttgaccaaagccaatgacaattagaggctaacatgtgaagatcaaaaagcaaatactaatttgattaattatcacaatatgactaattacaatttatataatacgaggtaggtaatacaatgaaattaagtcataagttagttatggtttcagcagctgttttgatgggtgttagcccagtattaggcatggcagaaaatactgtatctgttcaagctgctactaagagtactaatggcgtacataatacttacggtaaaaacagcaaagtcaaagtaactaagactatgaagtttgtcgaccgtaatggtaagaaaacttctaagactgctcctaagggtggtagctacactatttggaacgtcaagaatatcgacggtcaagtttactacagtattcaaactgatttgaagtactggattcctgcaactgcaactgaaggtacagtaacttataagtcaggcaatactacttatactttaaagagtgatggcaagaaggtaacaacttctacttcaactaagaaggctgttaagaagactaattcaaataaaaacactaaaaaagtagttaaagaatcaactaaaaaaactgccactaagactactaaaaaaagcaactcagaaaagactactaagaaaacttcatcaaagaagacgccagtggctaaggcagttaagataactactaagaataaggcttacgtttacgacaagaatggtaagcgtgtaaaaaactatttaggcactagttacattggtaaaaagatcactgttaaaggtttaggtactaagaccattaatggtgttaaatattatgctttgcaaccaaatcattattacattaaagcttcagatgtaactgttaagtaataattgataggaaaaagacactttttcgttatgaaaagatgtctttttcgtttctaaattggcaaaaaaatattttagatctacaatatataaatgaactttaagtttagtaagaatgaggtatttatcgatgaaattaagtcataaattagttatggtctcagcagctgcattgatgagtgttgctccacttttggatactgcagaaaacgtcaacactgttcaagctgctcctaagaagactacttcaaagaaggcagcaaacaacaagatcactttggtacgtaatgcttatgtgtacgataagaatggtaagcgtcttgataagtacatgggcagtgcaaaaaacactactattgctaaaggcgtaactgttacttcaactggcactaagactatcaatggtgtaaagtactacgatcttggtggtggtgcttatatcaaggctgttaacgtagatggtaaagctgcgtcatcaacttcatcactgtcaaagggtactaaggctaagtttgtttctaactcatacatttatgacaagaacggtaaacgtatcagcaagtaccaaggcaaatctaagtttgttaagggcgattcagtcactacttacggtattcaaaccattaacggtaagaagtattaccaacttgacaagaagggtactgcttttgtacgaactgttaacattgatggtaaaaccacttcaaaccaagaatcatctgtttcaaatgatgcagaatcaactaaaaaatatgactactcattaaagaagaatgcttatatttatgataagaatggtaagcgcatcaacaagtaccaaggcaagtctaagcttttaaagggtgccgcaattgatgtttatggcattgaaaccattaagggtaaggattactaccaacttgacaagaaaggcactgcttttgttaaggcaagtaatgtaactagaaccgttaaggcaacttcaattaccatgaagaagaatgcttatatctacaatggtaacggtgacaccaagaagaagacagttaagaagggtaagactgttaaagctactgaagcaagatacattggtactaagctttactacaagattagtgataatcaattcgttaaggctgctaatgtaggtaaaatttcaggcccagaactagaaccagttaacgaaccagatggtgctgctactgttgatactggtgataatactgtagatccaaacgtaaccaaggtaactacgattaatgttgctccactttacaacattaagggacaaccagataacgttagagcatttggcgcaggtcaaagtcaacaagtttcagaattgagatatattgcaacttctgcaactgctaccccagaattattctacaaattatcaagcggtagaggctatttaaagaagtcagacgttgctgtaagtggtaagattttaactcctgttaacactccagaacaagctagagcagacgttacagttgctacagcagctgataagactaagttgcttcaagacattaacgaagcaactagtgttaagaactcagaagcttacaagtttgcttcaagtgatgccaaggttgcatatgatagggcaattacaaatggtactgctgttaacaacgatgctgcagctactattgctcaagttaacgaagcagatgctgctattgttagtgcaaaggctaaacttgatggcaagagagttgctgttgctaacatgaccaatttaacttcagatgaaatggcagctattattaaggttgtagctaatgctaataatgtagcagaaagttctgttcaattaactactaacggtagtttatcaattagtgttaacggagctgcacaaattttgaacttaggcgattatgtaacacaagctgcagttgcaaacaactaaaaatatataaaataagacgtagtatctaaaatgacactacgtcttattttttaggatattttcgttgtactagaaagtacaaatatattctaacttttttagcgattaatagttagtgcttttttatggttgcggcaaaattcttgctataattaaggagaatgtggttctttttagagcaacttttgctaaaatagagctggttaaatatttttacggaggaaattatgtcctataaagacgatatgatgatcttcgcccttaactcaaatgtaccattagcacaaaagattgcggatcgtgtgggtgttccactttccaagtctagtgttgaacgtttcagtgatggcgaaattcaaattaatattgatgaaactgtgcgtggtaaagatgtctaccttgtacaatcaaccagtaagccagttaatgacaatttaatggaattgttgattatgattgacgctgtacgtcgtgcaagtgctcgtacaattaacattgtgatgccttactacggttatgctcgtcaagatcgtaagactcgtgctcgtgaaccaattactgctaaattggttgcagacatgcttcaagctgcaggtgctgatcgcattctttcacttgacttacatgcaccacaaattcaaggtttctttgatattccagttgataacttaatgggtgctccacttttggcagactacttcttgcgtaacggcttagagaaagacgctgttgtagtttcaccagaccacggtggtgttactcgtgctagaaagcttgctgaattcttaggttgcccaattgccatcgttgataagcgtcgtccaaaggctaatgttgctgaagttatgaacattatcggtaacgttaagggtaagcgtgctatcatcattgatgacatgattgatactgctggtactattactttagctgctcaagccttaattgatgcaggtgctactgaagtttatgctagtgcaactcatgctgttctatctggtccagctattaagagattgaacgattcaccaatcaagaatttggttttgactgattcaatcaatcaaccagcagagaagaagcttgacaagatgcttttggtatcagttggtccattgatgggcgatgctattaagtgtatccaaaaccatgaagcacttagcccattgttcaacaccagatacgaagctgacaagaacaagtaaaaattatttgaagataaagaaaacgactagtctagttgactagccgtttttttcatatgtttgagagagtttttgaaataaatgtaatgaaaagtaaatattttataaatcggttccgttagattcgatgaccttcttgtaccagtcgaatgaatccttcttgtagcgcttcatagagccgttgccatgattatcttcgtcaacatagataaaaccgtaacgcttgttcatttcgccggttgatgcacttactaagtcgatgcatccccatggtaagtagccccataaatccacgccatcttctgtgacagcttttttcatctccttgatatgactacgcaagtattcgatgcggtaatcatcatgaaccttgtgatcgtctgttagtttgtcgtaagcgccaagaccattttcaacgatgaataatgacttgtgccagcgagtagtcatccagtttaaggagtagcgcaaaccaactggatcaacaggccagccccaatcgcttgccttaacgaatggattttcaactaaatcactatattcgcgataatccatgtggtcagtgtatttaactgcaaaggacatgtagtaagagaaggcgatgtagtcaactgtaccatgtttcaagatttcgagatctttatcggtgatgtctaagttgtagtttttgcttttgaagtattgagtaagccatcttggatattcaccgttaacttgaacgtcgccgaagtagaggcgagagtccattgctctttgggcaaagaggatgtcttctggcttaggggatgcaggataaattgggcagaaggcaagcatacagccgatttgcatatctggattgattgcgtgaccaatttgtacggcttcagcactagcgaccatttcatagtgagcagcttggtacattagcttttgcttgccgtcaccttccttgaatttgatgcctgagttttcgtaaacggagatatcactttcatagttagcttgattgttaatttcgttgaaggtcatccagtacttgaccttgttgtgatagcgttcgaaacaaacgtgagcaaagcgagtgaagaagtcgatcaattttctgttgctccagctgccatattcagtgactaaatgatatggcatttcgaagtgggaaagagtcacaacaggttcgatgttgtactttaagcattcgtcaaatactttatcgtagaacgctaggccttcttcgttgggttgtgtttcgtcgccattaggaaagattctggtccaggcaattgaggtgcgaaaagccttgaaacccatttcggccattaatttgatgtcttctttatagtgatgataaaaatcaatggctttgtggttagggtagtatttatccttttcgatggtggcagtcaattcacgagggtgatttggtccgccgagagtcatgaggtcggcgattgagatgcctttgccgccttcattgtagccaccttcgagttggtgagcggcgacggcgccaccccatagaaagtttttagggaaagtagattcagtcataataaaaaactccttttgtctaacttgttataagcattatatgaaatcggtttcataaatgatagacaaaaggggcttttaggaatggttcgataaaatggctggttgtacctaaagtgaaacaggttgtttcatctatttattgtttttctttttcaattaaaatattgacgattccttcaaccaaatacattacaggtacttgtgaagaaaagtcgtaagcttcttttctaaccatttgttcatggtaggtaagggaataacggctcatttttgcgatagcgctagtttcatcgccggtgatgctgatcagaaggatatcgtcattgttgacaaatcgattgatcatttccaccatttcagtggtattacctgatacagaaaagcaaataatgacattattggtagtattttccaatttgaaaacgagcggatagaacggatccgtgacaggagaggtatttaatcctagagctgccatctttcttgcggcatattctgctaaaaaggctgaatcacccattccgatagtaataatgttgtctgcttgatagattttatctgcaacgatgttcagcttgctcaaagtatcactagggaagttatcttcggtaacgtaatgtactttcacgttgtgcaggctttggtgattgttttttaaataagctttaaattcagggaagctgttaaaacctatcttatgaataaagcgcataacagaagaactagagacgtgcgctccttgggcaatgtctctgacgcgcatgtaaattaccttatcattgttttgttcgatataacgatagatagtcatatcaacggtagatagttttgataaatctttaaatccaaaaaatgccataatcttattccttaatgtgaaaactttaaactaattgtactatattggaacactgtgttccaatcacgaaatattgagcttaaaaacagtatgatacctatctcctccaaaagccttgtctaacagcaaacgctttcatagaattaaagatgtcaaatgaaaatacgttagtaaaaaagttggaggaatttttttatgaagaattttattaacaataaaatattgccgccaattatgaaatttgttaatacaaaagctattattgccttaaaggacggtatgcttttgtcattaccattcattatgatcggttctttatttttactgcttgcttcattcccaattccagcagttgctaattggatgaatcaaacaggtttgactccattttggaatcaagcttacaatgcttcatttggtattgtagctgtatttgccgttgttggtattgcttatcaatgggctaagaatgaaggggtcgaaggactccctgctggtatgactgctttcgtaggattcctaattttgatgaattctactactccagttatgaacggaactaaaaccgttgtttctgctcaacaagctccaactcttttaacaggatttattgatcgtacttggcttgggggccaagggatgatcgctgcgatcattgttggtttacttactggttggatttatacttggtttgttaagcgtaagattactattaagttgcctgaacaagttccacctgcagttgctaactcatttattgctttgatcccagcagctgtattgactgcattatggcttcttgtatatatcttctttgaaaaggtagctcatactactttaactcaatggatttacgcaactattcaaacaccacttcaaggtataaccgactcatttggtggtatcttagttttgactttgctagtaccattcttctggttctttggtgttcacggttcaactttggttggtggtattgctggtccaattttgagtgccaacgctttgcaaaacgcagctatctttaagaaatacggttacgtagacgctgcacacggtggtcacatcgttattcaaggtttgtttgaccaattctcaactgtaactggtgcaggtatgactatcggtttggttgtcttcatgtgtttcatggctagatcagctcaaatgagaagtattggtaagttggcattggttcctggtatttttaacattaatgaacctgtattattcggtgttcctattgttatgaacccaatgcttgcacttccattctttatcatgccaccactttcggctggttcaacttacttgttaatcaaagcaggtatcttgccataccttaacggggtccaggttccatggactactccacctgtaatttctggtttcttaatcggtggttggaaagttgctatttggcaggctattatcttaatcatttcattttttgtatatttgccatttgcacgtagctatgacaacgtgctttacaaacaagaacaagctgccaaagctaaagaagaaaaataatttaaagtagaaaaaatgagcttttatctctatcatttaatttgtagaatagaagctcatttttaataggggaaaataatgaaaaaatatctctcaattgacattggcggaacgaatctgaagtatgccttaatcgacgaaaaaggacatattctagaaaaagaccgcgttaaaacagatgcaaaaaatcttactgcatttatggaaaacatgtatgaagtgatcgattcatatcaggatcaatttgaaggtatcgcaatctgtgcaccaggtaagatcgatactgaaaataagatcatttatttcggtggtgcgttaaagttccttgatggtttaaatcttcaggaagcattaggtgataaatacaatgtgccaattagtgtggagaatgatggcaaagcagccgctttatctgaacactggctcggcgaattgcgcggagtagatactggtgttgcaattactctaggcactggtgttggcggcggtgtcgttgttaataatcatcttttgcatggctggactttccaagccggtgagcttagctggatgattactaattctggtatcggcacaaagaacaaggctgcatatactggtgataattgttctgccgttaatatggttaaaaaggtaaatctagctcttggaaataaagatttagatgatggacttactgcctttgaagcgatcaataatggtgatttacgtgcattggcaatttttaaacgttactgccgcaacgttgcgattatgattattaatattcaaactgtgatcaatgcttcgaagtttgtgattggtggtggtatcagcaaccagccaatcttgattgaagaaatcaataatcaattagctaaaatccttgaagtcaacccaatgattggcaagcagatgatcccaccaaaaattgttgccgcaaagcatggcaacgattctaacttatatggtgccttgtattcgcttttgcttgaactgaataagcaataaaaaacagcctagttcgtttgaactaggctattttgatctacttattttttaacgtctgacatgaacttagcaatgcttacgctagctgtcgcaacacaagcgaccattgctgtcttacaactaatgtcgacaatatctttgactaaatccttattttcatggataaatttgaaagatgcattagtgtaatccatgcagtagccgtgaatagtgttcatcaggtctttcacttgagtgtagccactcttttcagcacgttttggttcatcctctgggttgatttgagttcttacatcattgttcataacaaatacctcactttcatttatacttatattttatttctttctaggtcttcttaagtaccttaatgcaccatttttaatatatttttgaaattgctcataaagtggatcgaaaatttgcggctgatcttcatcgtgactgagcatagttttagggaagaagaagcgttcatctccttggaaagtaccatttaatgcgcgaaccaaggggctgagttgggataactcaatcatgctgctgtcgtcttgcataatttcaatttgactattagcatttttccccgttggcttataagcatcatatggttcatcgaatgcggaattggtagcggtatagtagtcaggattaaagccagcttgcttgattaggctcttgagcttaggtaaaagatttttggtttcttcatcgattcggacactagctagcggttttctgtacaagtaacgcttggctaggtcagataagattggatcttgtgcctgggtccacatagaaaaattagtttccattactccatcatcaagctttaaataatcgtctaaagtccaattgccttcaaggaatttagtcaagctaggtgtaacttgcagatttccctttttataaacagcttgagcgcgctctaaaaggtgatgcaagatgacttccattgagcgtcctacgcggtggaagtagacctgttggtacatctgatagcgtgacacgatatagtcttcaacggcatgcatcccattgttggtaaaacaaataccattttgataaggacggattacccgtaaaattcttgataaatcgaacctaccatagttaactccggtgaaataagcatcccgctgcaaataatccatccggtcagcgtcagcttgacttgagatcattttaaccacttgcggattaggataagtcttagcgattacgctggcgactaattcaggaaagttaggtgcaacttgttttaatgcatggttaatttctgtattaggatcagtaatgatcttttgtccaattttttcatgattggtgccaaaaaggtgctcgaatgtgtgcgaatagggcccgtgaccgatgtcatgaagcaatccggcacattctaccagtaatcgattatcatcgttccagagaccgtctcctggcgtaattgagggatattttttgctaaagatatcgcaaattcttctcgttaattcataaacgcctaagttgtgctcaaatctagtgtgagttgcacctggaaaaacatagctaacaggacctaactgtttaatgcgacgcatgcgttgaaattctttagacttcagtatgtccaaaacaactttatcttcaatatgaatatagccgtgaaccggatcacggagaacaacctcttgttttaatttttcgctttgaaatcttgtcataaaaatccaccaagtttaatttattaattttttgaactatatataataaaatagattatatctaactaaaattatatcagagatatagtaataatgtttaaagggggcgcttgtttgacagcaattacgattgatttgactagtaaaattactcaagacgatgagacagagacttttacgcgacatgcgcaagggcaattgactgaagaaggcgacgtcacacgaatttcttatgccgaagaagggcaaattccagtgaagatgcttctaaaggagaatgaattgttgattcgccgcggcgttgacagcaataattattctttaatgaaatttattccgggtgaaaaaggcaactgccgctatgtagttgaagggcgccgcatggacatgaccagcgtgactaacttgcttgaatatcagagtcaagatgatggttcacgtaaacttcgggttgaatatgacctctttaatggactatacttaataggtaactatgcagtcacgttgatttttacttaaaggcctagtagaatagtaaagattgtataagagaggacgtacagctgtgggattagacaaatttaaagacaaaaatcgcgatgaattgtcaatgatcgaagttgctcgtgcaattttggaagacaatggcaagagaatggcatttgccgatattgttaatgccgtacaaaaatacttgaataagagtgacgaagaaattcgtgaacgtttaccacaattttatactaatatgaacactgatggtgaatttatctcaatgggtgaaaatgtttgggcacttcgttcatggttcccatatgaatcagttgatgaagaagttaaccaccctgaggatgaagaagacgattcacgtaagcaccacaagaaggttaatgccttcttagctagcgctactggtgatgatgacattatcgactacgataacgatgatccagaagatgacgacttagacgccacagacgatgatactgatgatgtattgccagatggcattgaaggtcaattgtcacaattaaatgatgatgatgatgatgacgaagaagataattaatttgcttgacttaagaagaaaaagcagataatatttttgttgggcaccctatgtgcgtttagctccccgttagtgggagcttttttgtttaaaggataagttaaaaggagcagaacatgacaaaatacatcttcgtaactggcggtgtcgtatcttcacttggtaaagggattactgcatcaagtttaggtcgacttcttaagaatcgtggcttgaaggtcactatgcaaaagtttgacccatatattaatattgacccaggtacaatgaatccataccaacacggtgaagtttatgttaccgacgatggtacagaagctgaccttgacttaggtcactatgaaagaatcgtaggtgttagaactagcaagtattctaacgtaactactggtaagatttaccaagaagttttggaaaaagaacgtcgtggtgactaccatggtgctactgtacaagtaattcctcatattactgacatgatcaaaaagaagatcatgcgtgcagctttgactactgattcagatgtaattatttctgaaattggtggtactgttggtgatatcgaatcaactccattcatggaagctattcgtcaaatgcgccgtgaagttggtccagaaaatgtaatgtacattcactgtactttggttccacttcttcacgctgctcatgaaatgaagactaagccaacacaacactcagttgctgagcttcgtagtattggtattcaaccaaatatgttagtgcttcgtgctgaacaaccaattgaccaagaacacaaagacaagatttctacttttacagacgtgcctgttgatcgaattattgaatcaattgatgctccttcattattcgatgtgcctttgaacttccaaaagcaaggcatggatcaaaaagtctgtgatttcttacacttagagagtccaaagccagaagctgacatggaagcttggaagaagcttgatgaacgtgctaagaccttgaagcatcacactaagattaccttggttggtaagtatgtagagcttgaagacgcttatatttcagttactgatgctttgcaacatgcgggttatctttacaacactaagattgatgttgataaggtacaagctgaagacgtaactgaagataatattgcagaaatcatgaaggattcagatggtttgattgtccctggtggttttggtactcgtggtcttgaaggaatgattactgcaattaagtatgctcgtgaacatgacatcccattcttaggtatttgtttggggatgcaaatggctagtgttgaatttgcacgcgatgtattaaaccttgaggatgctaattctgcagaagcagagccaaactgcaagaataatattatcgacattatggctgataagcgtgatgaagaaaatattggtggtactttgcggttaggtatttacccagctactcttaagaagggaactaagactcgtgcggcttacgatgatcaagatgttattcaagaacgtcaccgtcaccgttttgaattcaataatgaataccgtgaagcctttgaaaaggctggtatggtcttctcaggcgtttcaccagataaccgcttagttgaaattatcgaattaccaaagaaaaaattctttattgcagcacaatatcacccagaatttttgagtcggccacaacgtccagaaggcttatttaagtcatttattggtgcagctagtggtcttccagcacaagaattttaaagtgattaaagtttgattatacaaaatcttaagaaaacaagaactgagagacctcagctcttgttttttttgtaaatatcctttaacattattatgattaattgaaagtagaaaaggatttgttttcgccaatgaagcagatgataattcatggtggaaagcccctgcagggtgatgtttggatcggtggagctaagaactcaacagttgctcttattccggcatcaattttatcaagaacaccagtgaccttggaaggcgtcccaagaatagctgatgtggttaacttgatggacttgttaagtgagatggatgtacattgtgatttcggtgaaaccactttaagaatagatccaactgatatcaaaatgagtccgttgccagctggtaagattaagagtttgcgcgcttcatattactttatgggtgcgctacttggtcgctttggcaaggcagtagtgggcttccctggtggtgacgatattgggccacgtccgattgaccaacatattaagggctttgaagccttaggcgctagcgtaaaaaatgaaaatgatcaaattataattactgcaccagaagatggtttgcatggagcaaaaattcatttaaagatgccatcagttggggcaacgatgaatattattatggctagtgtgacagcacagggccagactataatcaaaaatgccgcaaaggaaccggaaattattgatttagctaccttcttgaacaatatgggggcagttattcgtagtgctggtactgactctattcgaattgaaggggtggagcagcttaaagcacagattcctcatacgattattccagacagaattgaagcagggacttatgttgctttagctgcctgtattggtaatggcattcgcattcataatattatcgaagaacaccttgattcatacctggctaaagttgaagaaatgggtgtagtaatcgattcagatgaagattctttgtatgtttacccagcgggcgacctaaaaatggtccaggtgaagacagatgtttatcctggttttgcgacagatttacagcaaccaattacaccacttttattaactgctaaaagcggtgaaggtgtagtaatcgataatatttatcctaaacggattggtcatattgctcagttgcaaaagatgggagccaatattaaagttgaagataatattattttggcccatccaactaagcagtttcatggtgcggaagtaactgcaggtgagattcgggcaggtgcctgtctgatgattgcaggcctgatggctgatggtacaacaacgatcgacaaggctggtaatatcttgcgtggttatgatcgggtccaagaaaagctgcgtcaacttggagctgatgtaactatcaaggatgatcctgctgtaccgggtattttagataatatttggtaaataaaaaccacatggaagactccgtgtggtttttgaatatgtcaatttgtaggtgaaaagaatgagtttgatttttacgagacgtgcgcaaaattcagatgtggataaaattgtgcagattttgcaggatgctattacttttttgaagaaaaatggctcaacgcagtggcaaagtggctatcctaaccgagaaacggtggaggaagacatcgaaaagcaagttgcttgggtattaactgtggataatgaagtggctggctatgcggcagtggtgattggaaaagatccaaattatgccaaaattgatggtgagtggaaaaataatgtggatacctatgcgacgatccatagaattgcggttgctagccaatttagagggatgcatttgactcaattgttcttaagtaatattatttcgctgacttatgcacaggggattcacaactttagaattgatactggcgcaaaaaataagatcgtccagcatattgcattgagtcacggttttgttcaacgagggataattcaagtagatgatccgattaatcctgatcgtttagcatatgagttgaatttatgatgaaacgcgtattaattttaggttcaccaggagcgggcaaaagtacatttgcacggaaattgcaatcaaaaacgaaattgccattggtgtatatggatcaacttttttggcatgcaaataaaactacggtctccaagcatgaattagatgaaaaagtaaagcgcatagtagctaaaccagcatggattatggatggaaactatcaacgtaccttgaaatatcgtttacccaaatgtgatacgattttttggttagattatccaactgaagtttgtctagctggcgtaaaagctagaaaaggaaaaccacgtcctgatttgccatggattgaagaagatgaagatccggaatttatgagttatattgccaagtttcggacagttcaaagaccgattttagtcaaagaattgcaaaaatatccaaataagcagatcattgtatttcattctcgccaagaagcaaatctgttcttgcacaaaataaggtaaacgaaaaaccacatggttgaaaattccgtgtggtttttgtatgcgattaattttttaatcaagcaagtcgtatttcaaagtcattaaaccatgaccttcgtcaaccatttgaccaagcagttcaacagtgttgttataaactgtatcagacatcttttgattagcagcaattaacttgtcttgtaattccttacctgaaaggttctttgcttctttgtcagtatcatgttggatcttgtgacattgtgctaaactcttttgttcaaaggcgtcttcaagttcaccgtaaacacggtagttggtatcgcctaattgagcagttaacttgttaagccaaaaaatcttgctcaagttaaatttaggagtggtttgccaagcttcaggggtagtagtgacattagtatagaatggcaccattgagttaaaggtgttaggaccaaaggctaaccattgtacacctgcaatttctgcaggaacatcattacgaatttgcaaaatatgggtttcaaagtttctgttaataccgataggacggaaggtcttcttttgttcaggagtaccttgatcgccataagcatcgtaaggagtgtcttggtagtgtgagctttcggcccatttaatatcttcaattgagattaaacgattagcatggcagataaaaggttgatcttgatctgctggagtgccaccaaagtctggatcgaaatagttgtgaatataccaagcacgaggattattgtagtgagcatccttaatagttgaagaaccaaagatgtggcgcatgttgtagccttcacggtctggattcaagtgatattcttcgattaaatcctttaggtctgctgaacaagcaaaattatcagaatcgttgaagtcgaaagtatcaatattcaaacggtttggtgcaataacatatgcatcatctgggatacggcgtgcaatccaatgatgaccaccgatagtttcaaggtaccaaatgttatccttatcagaaaaggccataccgttcatttcataagtaccgtatttttcaactaaatagccgacacgtttaacaccgtcaaaagctgagtgcaagtatggtaaagtcaaagtgacgaaatcttcttcaccaagaccaccttcacttggatcaagtaatgggtcaacaccttggatgcgtgaattagtagtgatggtttcagtagcggtcatggctacattttcagcgttaattccagctgcgccccaaataccatttttgcctgaaacatcaggtgctgaagtatagcgtaatggtgtttctgctaaatcagcgtcgtcaatcttttgtttagaaattacactagtgtagtgcttaggttggtcagctgggttaacagctttaaagccttcagggatgatgacgcggccaccgtcttcactacgagcgatcatcgtagagccatcaatagttgcttttttaccaactaaaatagtagtacattctgtttgtttcattggatcagtcctttactttatatttatgtttagagactgtaaaatagtttgtgtaaggatgaatgattccttaaatttatttctttaaacattagaaaaaggagttcctttctcgtatgattggtttgaacaaaaaaacacatacagaaagaagaactccttcatgaatgattttaccaaagattttgctcaagctctattcaatccagacaaaataaatgatttattgcgcaaagagctacaacaggctgttaataacttgctagaagctgagttgactgcctttctaggctatgatccctatgccagaaatggctggaatactggcaattctagaaatggtgcttatttccgcaaggttgatacccagtttggaccaattgaagtgcaagtgcctcgagaccgcaacggtcagtttcatcagcacacgctgcctgactacaagcagcactctgatgttttggaaagcacgattatcaagctctactccaaaggcgtaactaccagagaaatcgctgacttgattgagaaaatgtatggcagtcattatagtccagctcaagtatcaaatatttccaagcagatgctccccaaggttgaggcttatcacaagcgcaagctaagcgacaagtttttctgtgtctatttggatgcgacataccttcctttgcgccgagaaacgtttgagcgtgaagcagtctatattgccattggcatcaagcctaatgggcacaaggaggtcattgactactgcattgcacctagcgagaacattgaagtctggacagatatgcttcaaaacatgaaatcccgaggcttaaagcaagttgagctttttctttctgatggtgttgttggcatgaaaacagccttggccaggacttatcctaaagctcattttcaacgctgcttggttcatgtcatgcgcaatatctgtgctaaagtccgggtggatgaccgcgaaaagatcatgaacgaattcaagcagatacatcaacagacaagcaaaaaagaagctgcagctgtcttgcacaaattctatgccagatggaataaagcttatagcaatgtcatcaaaggtttgaaggaaattgagcccgatctgctggtcttctacaattatcccaaacaaatcagagcttcaatttattcaaccaatatgattgaatcctttaacaacgtcatcaagcgtaaagctaagcctaaggcagaatttccaactgaacagtcgcttgatgcatttattggcatccaggcaatgagctacaatgaccgctatttcaaccgaattcataaaggctttggtcaggttcaggataccttagaatcttattttgaataaataattaaaaaatcaatttgcgagaaagaactatttacacaaaagatttgacagtttctatgtttaaattatttcctaataatattgtatgcaaaaataatccgataagccaaagaatataattaatttccccgaaaggcatttggactaacaccgctatagcgtttaaatgccttggagaaggtaaattcatcgccgtagccgacttttttggcaatttgctttagattgtgtgtggtattagttaattctttcttagcggcttccatgcgcaattgcatgaggtacttttgaggtgataatttagtgttttttctgaataaagcatatagaaagctgcgtgatacgcctaatctatgacagagttcgacaatattgcaggtaggatcggtataattttgcttgagatagttaatggcaatttgatactgatcatttttcggtgttttgcggaccggtggatggttaggaaagtcttttactagatgataaaaaagttgataagttaaagcagaaatttgtaaattgtttaataaagtctttttcttatttaagtagagataaagattattgagcgtttgataaaaatctgttttttgaatttgacgcaagaaatttttattaggtaaatttgatgccttgatgctttcattaacgccgttgccagctaggccaatccagaaatattcccagggttcattgtggtcagcttgaaaggaacaagtttgactgcgtggaacgtaaaaaagatcgccagcttttaatttaactgcgtggtgtctactagaagtaaaggtaccagttccgctaataatgtaataaaaaatatcgtttttacgaagattgtcaccttgaaagaattcatcgggctgacatttttgtcgaccataaaacatgatgtagctatcaagattttggttatttaagttaggcatagacttcctcactgttgaaaaattatgttacttctattatagaagagattttgcttaaaaggtgaagaatgaaaaacgaccacattaagcggtcgttcgtgaatatttatagaaaattatgatatgtggaattataaaatgaaaaggtattttacttattggcaccacttcttccattgaataaaagattgagcagagttgcacagatgctggctacgacgataccgttgcctaagaacaattgaatggtttgggggagagtttggaagatttgaggatagacagtaacgcccaatcccatcccgattgaaatggcgacaattaaaatgttgcgattattttcaaaatcaactttagttaacattttgattccttgaacggcaatcatggtaaacatgactaacatagcgccgcctaagactgaatcagggatgatagtaactagagcaccgattttaggaagtaagcccatggccattaataagccagcagcccaatagatagggcgcttggttttaataccggataattgaagtaagccgacattttgagaaaaagtagtgtaagggaaggtgttgaaaagcccaccgaagatttgtgctaatccttctgcacgataaccttttttgaggtcttcttcggtgatatcttgatgaagtaggtcgccaatggcaaagaagacgccagtggattcgaccaaggaaactaaggcaatgatgatcatggtcaaacaagatgaccattcgaattcaggaacgccgaagtagaaaaattgaggtaagtggaaccaagaggcttgtgttacgggtgtaagtgaaactaatcccatgcaaccagcaatgatagtcccagcaattaatccaattaaaacagagatggagcggagaaatcccttagcccagacttcaatgacaacgatgatgaggatggtgataaaggcagcaataagattttttgcatcaccaaagtccttggcttgggcatttccgccacccatgttttgaaaggccacgggaatcaaagttagtccaattactgtaattaaggtcccagtaactactggcgggaagagttttttgatttttgaaaaccatccggcaattaagaaaacaaagattccagcaacgataatggcaccatacatggtgttaattgaaaatttttgcccgatcatttctaagggagctaccgcttgaattgcacagcccaaaacgactggcaagccaatgccgaaatatttattacggaatagttgaattaaagtggctaaaccacacatgaagatatcaatcgaaactaggtaagtcatctgtgtgctattgaagtgtagtgccgtaccaattaaaaggggaacagcaactgcaccggagtacattgccagcaaatgctgcaaacctaggacagcagcttttttgtgactaacttctttttgtgccatttttaattattcttctccctcgaagtgtacttgatcattttcaaagctatcgatttttgctagggcttcaaaacgtagaccttctttttctacccattcgcttccgccttggaaggtttttgcaacaacagcaccaactccaacaatgtcgcagccggcttgtttagcaatgttaaccatgcctttgactgcttcaccgtgggcaacgaagtcatcgatgattaagatatgttcgcctgggtgcaaaaatttctcttcaacgcagatcttattgttgaccttcttggtgtaagaaaagacgtcagcccaataaactgcatcattcaaagtagacggctttttctttctggcaaagatcattggcacgtgcagttggtaggctgccatgacaccaggagcaatcccggacgcttcacaagttaagaccttatcgactttttcatctttaaaaaggcgggcaaattcttcaccaacatgcatcattagttgcggatcaacttggtgattcaaaaatgaattaattttaagcacatttccaggtaaaacttcaccatcttgtttaattcgatctactaattccttcaatattattctcctcaagaaagaaataaggacttcttctacctaaaacaggtaaaagaagtccttaagattattcttaactttcattcacctatagtccggtatttacggtaccgggtagagactgtcgaccttatttcgacgatatatagatatttgtgttggcttaatcttaacagaatatattgccgaacacaagtggaaaattaaggattaatgttcgattatagtaaaaattattcagctgcgatatcgttatggcacagactgatgatcttttcgataatgccatataagatccccgcgattggccagatgatccagctgcgttcccaatcattggtaatgaagctatatcctagataaagtaagactgctattaaccaatagagtgtggcgtatttgttcataatcttgcgacagccggttaattggattgttaaattgcccaggtcaagcataatagctagggcagtagaaaagcaaaggatggctggactgcgaataattaaactaatggctaaagcgcgaaggctggcacttttttgagcagctgttaagtagccttgctcttgttgatcagataaaattggcaattcttcagttaagttattatctttgtggtttaattcaaaagaaggtgagccgcttttgagtaaataatcggtggtcactccaaataattctgataaagctacaattttttcaatatcgggaattgattgttcactttcccatttggatacagcttgccgactgacattcatcttttcagctagtgcttcttgaaaaagatgatttttcttgtgtaatgccgcaattttttgacctaatctcatgattgatcgtcctttcgttttgaaataatttgatttaacgaaaatttgcggttgcagaccaccactttttaattgcatttagcgcaactagtagttgcaactgctggttgctcaagataaaagccgaacaatgaatggctatttttaactttttgattgacctttttaatttttcctagtagagttagttaaaaatgcgtaattgaaaagagggagtaaatagtggctaagaatctagacgattttgataaaattattgtgcttgacttcggtagtcaatataaccaattaattacccgccgtattcgtgacttcggcatctattctgaacttttaccacacgatctttccatggagaagattaaacagatcaatcctaagggaatcattttctcaggtggtcctaacagtgtttacgataatggtgcattaaaggttgatcctgcaatctttaagttggatattccaattttgggtatttgttacgggatgcaattaatgtctcatgacttaggcggtaaagttgaacaagctgaaaacaaggaatatggccgcgccaacattacggttgaagatccagacagtattttgttcaatggcttgccttcaaagcaatacgtttggatgagtcacggtgatttggtaactcaagctccaaagggcttcgaagtaactgcctcaagcaaaaactgtccaattgctgcaattgctaatccagataaaaagttttatggcattcaattccacgcagaagtgcgcaattcagaatacggtttagacatcttgaagcactttgcttttgaggtttgtggtgctgaggctaactggaccatgaacgacttcatcgacatgaaggttgatgatattcgtaaggaagttggcgacaagaaagttatcttaggtctttcgggtggtgtagattctagcgttactgctactcttttacacaaagcaatcggcgatcaattaactgcaatttttgttgatcacggaatgctgcgtaaagacgaaggcaatcaagtaatgcaagccttgaacaaggatcttggtgttaacatcattcgggttaatgcccaaaagagattcttagacaagttgaaaggtgtaactgatcctgaaaagaagcgtaagattatcggtaaggaattcatcgaggtctttaacgaagaagctaagaagttaaaggatgtagatttcttagctcaaggtacgctttatactgatgttatcgagtcaggtaccaacactgcccaaacgattaagtcccatcacaacgttggtggtcttcctaaggacatgcatttcaagctgattgaaccactgcgtaagttgttcaaggacgaagtacgtgaacttggtgaaaagctgggcattccacatgacttagtatggcgtcagccattcccaggccctggtcttggtatccgtgttcttggtgaagtgactgaaaacaagcttaagattgtgcgtgattctgatgcgattttacgagaagaaatcaagaaggcaggtttacaagaaaagatctggcaatacttcactgttcttccaggtattcgctccgttggagtaatgggcgatggacgtacttatgactatacgattggtattcgtgccgtaacctcaattgatgggatgactgcagattttgcccaaattccatgggatgtacttggtcacatttcagatagaatcgtcaatgaagtagataacgttaaccgcgtagtttacgatgtgacgagtaagccaccttcaactattgagtgggaataatttcgtaccttaataagaagagaaaatcccaatatgacggcatttgaatagggtcaatattagtggaaagtaccggttgaaagcaagttgtctaccgaaaattgaatattttgcttacttttgttgaaaagtaagtgactgttgtcctacttattgtcatttgataagtggggcatttttttctctttgttgccacaaaagaaatgctgaaatccaaacggagcagtctgtttgatcgttgttgttacttatgacgaaaacataagtaaatcagatatgaaatctcgaaatgaccttgaatgaaatctcaaggtactcattctcgaatgcaatatctgatcggtcgcaaccgaaggctgaaaatttattttgccgggacggcaaacatgagggggtcattgcacgatgaagccgttaaaggatgagctaattcaaagtcgacttgatgaagatgaattagcagattttgataaagtgaagaaactgctcgatgtgaagagtaattctgttgcaattcggcagatgattaaagatgaaatgagaaagccagaaatgaatggaagcaaggtaatactgacgttgtatcagcgttattaaccaagctgtctgctgaaggtcgcctaccattgtcagaggcgttgatgggtattacaggtactaaaacatcatcacaattgagtatcttacaaaatcagttcgccgatattcaatcacagttagaaagtattatgtattcagtgacaaaaatggtcgattgaacaagtggctcatgtagttagaatcgcctacaagaccatctacaactggattgagcaaggagtattggatattggcgtggctgatttacctgaccatggaattcgccgccgacgagccaaagaaacccgtgggacttttagccatggacgttccattgaagatcgtcccgctgaagttattgaccgtcatacctcaggtcactttgaagcagatacagttttatctggaaagcgtaaaggtcaagcaatagctacgtttgtcgagcgtaagagtcgtcttatcatcgttaaacggcttcagggacgagatagtacctcaataaccaaggccattttagaattagctaaccagttagaagataatctcaagccccttactgttgaccatgggaaagaattcgctaactacaagctaattgaaaagcaggccaggattcccctatactttgcgcatgcttattctccacatgaatggggcagtaatgagaatcgcaaccgagtactacgacgctttatcccaaaggtcaaccgattgagaaaatcactgatgatgagttaattcaaattaactggtatttgaactccaggccactcaaatgtttaaactggcgcacactaattgagatctttttgcgtaatctgcgtcactaactttgttcaagttatttcttgcaatctgccgtttgaaaagagattagccttggcggttagtctcttttactatctggtaagttgactgcaaacagaaaaaagagccaagccgtcatcaaagtcgctaaaccgtgctataatgttgtcggatttaaaaataccactagttattaaatttgggaggcaagaataacgatgaagcaacttaaatttttagaaactaagcggacaccgcgttatagtttgcgtaagtttagcgttggtgtggcttcggtattattaggagtaaccatttttggaattaactttacaaatcattctgtaaaggcagcaaccatagaaagcgttaaaacttccaatagttcaccagagacgcaaggtagtgcaagtaacaatgcaacagctaataattctacagaagctgcgacaaccccacaatcttcaccagaaacgcaaggtagtgcaagtaacaatgcaacggctaataattctacagaagctgcgacaacctcacaatctttaccaaagacgcaaggtagcgctcacacttatattagatcattagcagcaagatcagcagctacgaattttatggtaacttctggttctgacagaaatgcagcaggtacagtagatcaaaataacattaatactcagctagctaaagaaaatcaagaattggccaataaggctaatctaacttcttcagataactacagttctaatatctataaaggtacagatggaaattattacaagattgtaactatttatggtcaggactacgtttaccgtgctgctgatattcaagctagtggtgctgattttaagggggatcctaaacaaacagctgaagatactaaaaataatatcaatatttctaaagaagatttaggaaatggtaagacccgttggaaggttgttttcttccctaataagggattacaaaatgttggcagtaaattaagtgggttaagttctgcaaaatttggtattgccctcacttctgactaccaaatcgttggtaatgttgacatgaaagtaattagtaatcctaatcaaacatttgaatcttatacattttagcccggtagcactagcgctactgaatttccaatacaaaatctaaaaactgaaaaagacttttcatttaatcctaagacagatgttgatccaaatactggtttaattaatagtgaaaccatgccagcttataacaatcaatatttgcaaggcccatactatttcactactgctactgatgttggtgctaagaacttatggcagacttactttaaagatgctgatgaacgtaagaatgcatatgatgggtccccttatctaggtggcaatcatgactttcattttaatacttttaaaattgcaaatgaaactggagttgacggtgcaaaatataaagacccaatcatttatgacaaactggggtataggttaaattctaaaaacggtgtagctaattctaatggcgtatatagcagtgataactttaaccaagcaatgtcatttaagtcacaaggtgtcactagtaatgcacaattttcttcttatgttatttcctttactacgcaacacacagactctcatgaagtagaattaactacaggttcgaaaaatcaacaattctcaggaatcgcagctaatatttattcttatcagaattggtactatagcatgatgtctagcttatatggtgagcagagagcactggatccagctggtgcaccaaaaacacctaaagatgttatttctggttgggttgatgccactagagctctggatgagattaagaaagactatttaaataatgctcaaattaatgttttgcggaataaaattctaaataacattacagactctgatgctgtaaataacattattaaagaaggaaattccttaaacgatgctatgaaaaatcttggtaatagtatcggacagtatgatcctgatggcagttttgctgatcacaaggaagatacaacaaagaaatctgatcgctataaatacgcaagtccagataaaaaggcagcttatgacaatgcaactgaagtaactaaagctttgattaacaaagatacaggtacctatgcagatcaagcgacggtagaacagcttactaaagatgaaaatgatgcttggaacgaacttaatggtgtcaagccaaaggataatgaggttaactctccggtcggtggtaccattactattgaaaagggacatgcattagattcaactgatgccgctaatgcaattaccaataaggatagtttgactaatgtaaaaagttattcttggtcgggtactccagatacaagtaagccaggatctattagtccaaaagtaatagttacatataatgatgatagtgctgatgaagtacctgtaactgttaaaataaaaggcgatgctgacaagtacaacccagagggcggcgaaattactgttaatagaaatactaagttaggtcctacagaggctgaagaagcaattaagaatgctcaaagtttacctaatggaacaacatatagctgggctggtaaaaaacttccggacacaagtacatcaggatcaaaagatggctgggtagtagttacatacccagatactagtcatgatatagtacctgttaagattaatgttaaaaaagatgcagaaagctacactgtaactcctaataatgaagtttcagttgataagggagaagatgtagatccagctagcttagtaacagtaaccgatccagatggcaagcaagtacaactaccagcaggttcaattgactggaaggatggcgcaaagcctgacttgactactccaggtgataaaactggtagtgttgaagttaccttcctagatggatctaagaaagacactgatgttacaattcatgtaaagactgatgcagaaacttatgatccacaagcccaaccttggactacaactgttggcaaaacgcctaaggctgatgaagtaatttcaagcactgataagaatggtaagaagatgccaagtgatgcaaaatacacttggaagactgaaccagacacaagtaaaactggtgaggcatctggtgtagtaaaagtaacttacagtgatgaaagccaagatgaagttcctgtaactattaacgtcaaggataagctagatgacaaggaaaagtaccacatctatggcaaagatggtcttaaggtagataagaacggtacattagctccacaagatgctatcgatgtaaaggatgctgatggtaataagactactttaccagaaaactcaatagtagaatggactaagaaacctgactttagtcaagctggtaaggatgtaactggcgaagtaactgtaacttatccagatccagatcacagcaaatctgatccagtaactgtaactgttcatgttaatggtaaaagtgatgaatacaaggttgcacctagagatggtgtaactgttccaagaggtagccaagttgatccagaaagaacagttgttgctcaaactccagatggtcaaccagctagtttcccagatggaactacacataaatgggtaactccccctgatacttcaacaactggtaatcgtacaggtgtagttgaaactactttcccagatggttcaactactagaactacagtcactgtaaaggttcagccaaatcaaagtgataaatatgatccacatggaccagagaatccagatgatagagtcccagtaaaaaatccagaccacttaactggtggtgataaggataatgttaagggtgaagttggcaaagaaaatccagatcttccaaaggatacagaagttacagtcgatgataagggtaacgcaacgattatctactcagatggttcaaaggataaaatcccaggtggggatttggtacgtccagaaaaagacgctgataaaaatgatccaaaaggtccaaagaacccagatgatagagtcccagtaaaagatccagaccacttaactgatggtgataaggataaggttaaggatgaaatcggcaaagaaaatccagatctgccaggtacgattgatgtcgatgataagggtaatgcaacgattacctacccagatggttcaaaggatacaatcccaggtggagatttggtacgtcaagaagataaggacaagtatgatccaaaaggcccaaagagcccagatgatagagtcccagtaaaagatccagaccacttaactgatggtgataaggataaggttaagggtgaagtcggcacagtaaatccagatcttccaaagggtacagaagttacagtaggcgatgacggtacagcaacaataaaatacccagatggttcaaaggataaaatcccaggtggggatttggtacgtccagaaaacgacgcagataaatacgatccaaaaggaccaaagaacccagatgatagagtcccagtaaaagatccagaccacttaactgatggtgataaggataaggttaagggtgaagtcggcatagtaaacccagatcttccaaagggtacagaagttacagtcgatgataagggtaatgcaacgattacttacccagatggttcaaaggataaaatcccaggtggggatttggtacgtccagaaaacgacgctgacaggcatgatccacatggaccagagaatccagatgatagagtcccagtaaaagatccagaccagttaactgatggtgataaggataaggttaagggtgaagtcggcacagtaaatccagatcttccaaagggtacagaagttgcagttggcgatgacggtacagcaacaataaaatacccagatggttcaaaggataaaatcccaggtggggatttggtacgtccagaaaacgacgcagataaatacgatccaaaaggaccaaagaacccagacgacagagtcccagtaaaagatccagaacacttaactaaagatgacaaggataaggttaaggatgaggtcggcacagtaaatccagatctgccaggtacgattgatgtcgatgacaagggtaacgcaacgattacctacccagatggttcaaaggataaaatcccaggtggagatttggtacgtccagaaaacgacgctgacaatatcacaccaaatattccaggcgataaagttacagtcaaggacccaagtcatttaactgatgatgaaaagaatcaagttaagaacaacgtcgataatgctaacaaggataagttcccagcaggcacagttattacagtaggcgatgatggtacagcaacaattacctacccagatacgtcaactgatacaatccctggtgataaattagttaagggtgaagatagcggctcaacttcaggacaaacagacgctggcaatatcacaccaaatattccaggcgacaaagtaacagtcaaggatccaagtcacttaactgatgatgaaaagaatcaagttaagaataatgtcgataatgctaacaaggataagttcccagcaggcactgaagttatagtaggcaatgatggtacagcaacaattacctacccagatggttcacaagacatcataccaggtgaccaattagttcaaggccaaaagggcgacacaactgatgctggtaacattacgccaactattccaggtggcaaggtaactgttaaggacccaagtcacttaactgatgatgaaaagaatcaggttaaggataacgttgataatgccaacaaggataagttcccagcaggcactgaagttacagtaggcgatgatggtacagcaacgattaaatacccagatggttcacaagacaccataccaggtgaccaattagttcaaggccaaaagggcgacacaactgatgctggtaacattacgccaactattccaggtggcaaggtaactgttaaggatccaagtcacttaactgatgatgaaaagaatcaagttaagaacaacgtcgataatgccaacaaggataagttcccagcaggcacagttattacagtaggcgatgatggtacaactacagtaacttacccagatggttcaaaggatgtcattgctggtactgatttagtcatcgctgctaaaagcgaagatgttcctggaagcaagcatcattcacataagaatggttcaaactctagtcaagctgatggagttaagggagcttctactgctaatggcagcatcgcaaacgctggtaacaacctaggtgttaagggtgaaagtgataatgccattggtaataacaaggctactagcttaaagacattaccacaaacaggcactaaagatacttcaattttgggtgtgcttggtatgcttttagcttcacttggtctattcgtatttaagaagaagcgcgataaagaataatttataatagttttttataaattctattggtaaaagtatctagagaaagttaattctcagatttaaaaagacgatcgaaaacttttgaaaaattgtttttgatcgcctttttgtgtgaaatgaaaacaagattctacgtaagcgtaaaataaccgagtatctagattagttttagatttcaattatgattaatttatcaatattttggaggttattcatatgtcagaaaaaaagctaatcgtccctcttgttcgtgagccaaaagctaaaaagtctaagccagctcgtaatcatttactgctttctttaaagaaaaatgacctagaattagacttccaatgtcattaagttaagctattgacttttgaaaactgatctttttaggaatcgaatcatttggattcgattcttttttttgcaaaaataaaggcgaaaagacaaacgaaatttaaaagccaagtctgcagtatattacatgtatcgcgtggcctaattaaaaaagaaatacaaactacgcttatttagcatacgcaaaaaagcatcaaattggctatctaaagccaaatgatgctttaattgtttttttctccaatgtcaatagcttaacttaatgacattgattaaatttgcgggctttatttatttttatattgccaacccaacaagcgagaaaataatttcactaattagtactaatagaacatttactaagatgcctgtaaaggttgattctttatgtggattttttacgaaagtcttagttgtgtggtaaacaagcggaatagtaagtaaactccctaaagtaataactggcaaatattttaatactattaccaatattaaaaagatgtaggctaatacatagtaacaacataaaatagtcagggcagtttttcgacctgtatagtagggcaaggttttacgtccgattttgacatcttcagccacatcgcagatgttgttggctaacatgacattggcaatgacaaaaattgccggtccagcaacgataatggctttagcccagaaaaaattatcgaagggatgcacgttatacatgttgatatataggcctaaaaatgtaatgttgtagcccattgtaattcctgaagctggttcaccaaaaggagtttttaaaatggggtaagggccacctgagtagcaatagccgattagatagcttaaaatcccgattaataaaataatccaaccgactttaatgctaaggatagttccgataattgcagaaattaacgtcaaaataatgattatttttcgagcccagcttttcgtaatattaaatttctctaggatattgttgtagctagttatatggttttgcttataacgtgcgtaatctgtgtattgattatgaccattaactgctaaatgaaagcaaatcacagctaaaaatagccataatgaatagactagattaaagttgtgataatagtagctagccatcaccgagccgataatatatggcagagccgagataataattgtttggatttggaccaaggcattgaatttttgtagtgtagaatattttttcattggttcctccataagtattaaatagccattatcttcagtataaatagatagttataatttacaattatcttgggtagaaatcttattgtttagaattaagaaagcttaatattattttttgtggtggtcgatgtaagtcagcaaagccaacaaaagcatcaaaaagctactctcgtaaaccgacatggttgaactctttctgtagtatgttgaccattgttaaaaaaggtgaacgcgtaaaatactaaatttttactctaacaaagtgtctgggaaaaagtttatttttaattaattttagactttcactcaaaaaaatcctaataaatcaaggtttattgataccaagatttattaggatttcttaatttctgagtttttcccagacactttatttagactattttcttaacttgtgcaccttatgggctagaaccatttctttattgcgatcttcatagatcatatccttgatgtaattccatgggattaacaaaggcgttttgctatttttacggaaaatgaagtctgcgtgtcgtctttccaagtgacgcaaatatcttttagcattttgaatcttagtatggtgttccaaatgcaatcgtggttcgaaatcgacgattttgtgttcagcgttgaaaataggtctaactttatggtgccagttctcagcactagagatatgatcgctgaccttttttccggcttctacgatattctctttggttgctggacttttctgatccttaaactccgcatgtggatctagatagtagttgcccaaaccatcttgacgataaagtcgtattttcttgaatgtcttatttttcttgtccattcttacttcgataacgtcaccatttttgtgattcattaaatacatgtgatgttttctagtgtaatttgcacttttcatgatcagaaatctcacctctacattaattattctgaaacgatattataccagtattttaactatatttttgctttacgagtataaaagtttataatttttaaaaagaaatttcaattcttgagaattagagaaggaaaaaatcctaatgaaggaacttaatatattttattatgctaccatttggagttttattattggagaaactgtcaaatcttttgtgtaaatagttctttctcgtaaattgattttttaattatttatttaatcaaagtaggattctaaggtgtcctgaacctgaccaaagcctttatgaattcgattgaaataacggtcattgtagctcattgcctgaataccaataaaagcatcaagcgactgttcagttggaaactctgccttaggcttagctttgcgcttgatcacattgttaaatgattcaatcatgttagtcgaataaattgaagctctgatctgcttgggatagttataaaagaccagcagatctggttctatgtctttcaagcttctgataacatggctgtaaaccttgccccatttggtatagaagtcatgcaggacagctgtggcttcttctttgtttgtctgttgatgcacctgtttgaattcgttcatgatcttttcacgatcgtcgacgcgtactttagcgcagatattgcgcatgacatgaaccaaacagcgttgaaaatgagctttaggataagtcctggtcaaggctgttttcatgccaacaacaccatcagaaagaaaaagctcaacttgctttaagcctcgggatttcatgttttgaagcatatctgtccagacttcaatgttctcgctaggtgcaatgcagtagtcaatgacctccttgtgcccattaggcttgatgccaatggcaatatagactgcttcacgctcaaatgtttctcggcgcaaaggaaggtatgtcgcatccaaatagacgcagaaaaacttgtcgcttagcttgcgtttgtggtaagcctcaacctttggaatcatctgcttggaaatatttgatacctgagctggactgtaatggctgccatacatcttttcaattagatcggctatttccctggtggtcacgcccttggagtaaagcttgataatcatgctttccaagatatccgagtgctgcttgtagtcaggcagcgtgtgctgatgaaattgaccgttgcgatcccgaggcacttgcacttcaattgggccaaattgcgtatcaactttgcggaaataagcaccatttctagagttgccagtattccagccatttctggcatagggatcatagcccagaaaggcagtcaattcagcttctagcaagttattaacagcctgttgtagttctttgcgcaataaatcatttattttgtctggattgaatagagcttgagcaaaatctttggtaaaatcattcatgaaggagttcttctttctgtatgtgttttttttgttcaaaccaatcatacgagaaaggaactcctttttctaatgtttaaagaaataaatttaaggaatcattcatccttacacaaactattttacagtctcttattggaatatgctgtgctacatatttaaacttaattaattttattatctgaaaattgaaagcaccaaaatcaagctcaagtcctgtcactattgagctttcttagacgtaattagtttttatatgatctgtttcagtgcaatttgtatgaatcgtggcagttggttaataaagtcattgattacttcatctatcttttcaaaactattctgtttaagctcttttaattctgaaattaagtagaccaatgcatctacgaatctaatatcaggtaaggattcgttcattagatagaataaatctccgattgtcttatcatctgtattttgtctttcctgccaggtcaatagatcataagttattgctgtaactgcgatatagccacattggccatcatagctttgaacttgagatttatctaaagcaagatattgcttagacgtcttaaaatatgtttcaatttgccatctacgaccataaagttggatgatttcttcagggctaagctttgtctgagtagtagctaaaaccaaatacttgttcttgtttccacggttggagacaaagacgagctttaataaaaagctatgtccatgatattgagcctcaactatgcttgaataaagataatgtttctttttacggatgtttgaagcagccaaacgatcatacaagtctttaacgctatagcggcgatggcgataaatgtaataaatctttgaactcttcttgatcatgccaagtccatctaaaccgatcttctttaaaatccaaaacattcttggagaagaaaaccaagaatcgaataagacgtatttagcttctactcctaatcgtaaggcttgtctaatcaactctacagttacatcattcatctttctctgagcttgatttctccttttaccagaaattgaacgttcatcagcagtaatgggagcagctccaatcatatttttcttggttttggttgacatcaaggcaaagttaaccggcaagaaggtattgccatcgctccagcctaaagttaaaccacgatatccgttcaaatactcatgcttgtcatggtcatagactttagctagcaattcggtctttttagaaaaagaccgagccatcagcgtatcgtcaacgataaaagcaagtcggcgtcttttatcgataaatggttttaagcagccaatgagccgggctgcaatcaagcataatagtttttgccagttgattcttccatcgttaagtacattgcgagcagttctaacggaaaaacgtttgtcatccttagctctgaataaagaaagccgagcaaaatgtactgacatcagccaagagataatcatggttaatgaaacggtggatttacgcttaaaattgacttgtttagttaacttagctagaccaattagattaataaatgaagaaattaaggatttagtatcattttctgtgtcgatttgttctatactgttcattgcgcaggatctcctttactttttaggtcgacacttaaagtataacgcagagagagcctgcgtttttatttttgataagaaaaagccaagaggcgcggggaaggagcgttaatcttagctttcaagtttcagttttattattaattttgtctggcatgttttgtttgataaattacctgttcctagtcaggctttaccgttttttatttgtattccttttggtttcattattggtatattaattaagcgtttaggatcatatccattaactatcgaagaagttttaatgagtgttaagcaggagggaaagatcaattatcacaattggtggaaatccttaaccttaggtcttatttctttagccgcgggtggcagtattggaccagaggcttcaactactgtactaggaagtggcatggttaattggctgggagatagattacgactaattgcttattcttctgattggaaatggaatcatttttgggatactatcgtttcgaaaaaacaactaaaaaaactgccaaaatttagtagcctttttaaatcaaaattgcatcaaaaagttttttgcttaattatggttatgatcggcgtggttggtgcagcaatagtctttaaattattccctgaagaaggattatttggtattcatcatcgccatattctctggcaatggcactatagtatgtatgtaattattccattgattgtaggttggagcttcggtatgtttttcttatggagcgaaaaatggagtgattattttgctaaaaaaattactatttcaccgattattaaagcaactatatggggaatagttcttgcattacttaccttaattactagttatgccttgtattctggtgaatttcaaattgttccatttgtacaccaggcgttgcaaatatcaccattatttttgctagttatagcagtcatcaaaaccttgtctactaatataggttttagtttaggctggcgtggtggaaaaattttcccttcgatttttgctagtgtagcagttggcgcagcgattgcgcaatttttaccaattatgccagttatgtgtgtagccattacagttagtgcaagtattgcagttatcttgggtaaacctttattaacagctattttattgattctgttattaccaatagaattggctcctgtcattttagtaagtgcgtatttagctgcctgtttaacaaaagtgagctatagttttagacaaaagaataattagggaggtatttttatgaacgaaaaaaacgatgcagtaactggtgcttctttgatagagaatcaagaagaaaaagtaaaaagcccatggccgggtcctaaaggtatgattcctgtaacaagtgggcgtgctgacgatgctaatgtacataatcgtgcctacttagacaatatcttggtggagatgcgtttgcttgattcagttgagccagacttaacaactgagatttttggtaaaaaatatgcctcacctttaactctggctgcagtctctcatttgaacaaggttttaccagataagacacataagccaatgcaagaaaaggcacgtgcggctaagaataccaatactttaaattggattggtatggagtcaaacgaagaatatgccgaaattgtcaaagagggcggcgatacagttagaattgtgaagccttacgcagaccatgataaaattatgggcgaactaaaacaagcagaagaattaggtgccgtagctgttggaatggatattgatcatgtgcctggtgataatggtaaatatgatgtagtcgatggtattccactaggaccgatttcatttagcgatcttgaaaagtatgttcatgcagttaaactgccgtttgtggctaagggcgtgctatccgtgcgtgatgccgttaaggctagagatgctggtgccaaggcaatagttgtttcacatcaccacggccgcgttccatttggcgtgccaccactaaaagttttgccagcaatcaagcaagcactaaatggcagtggaatgaccatttttgtagatggatcattgatgacaggctacgatgcatacaaggctttggcattaagcgcagatgctgtactgattggtcgagggattctttctgaattgttaaaagatgggcaaaaagcaacagaagataagattaagaaaatgaatgagcagcttgcacaaatgatgttgtatactggcgttagagatactaaatcatttgatcctagtgtgttacattttgattaggatagaaaaatgaaatagtttattttttacagtttactataattaagtggctattagcctataataaaggcgtttaaagctatactgaatagtgttatgcttaactcggacgttgttataaggtaattatttaaaagtaattagttgtatacgaaaacatgcttagctctggtaaaagctaagcatgatgtctcataatattgagccgcttgtagattatactacaagcggttttattttagatgaaaataacaagtatttcaaaaagtgagtatctatgttttgctattatggaaatggattgatttagaaaatgatgctattgaaatttcattatgagcggggatgcaaaaccttttttaaaaagcataagaatgagcaaaagataattaagcagttaatcgatcaagcgattactaaggaattggcaactggtatgactaaagtgaagatcgctgcaatgactcggattgagggaaaatcaatttacgagtttcgcctaaatttgaaaaaagcgggttcagcgagagtcgcttttgcagtaaaggatgagcaagtactagttcttttgattacctctaatttacagaaggatagttttagtcatgaattagaaactgttctgaaaggaagtcattatgcgtttaattccaattaagcaggcagagactttgctcaaaaaaatgtgtagtaataaaagtaaatatgtagaaattaaattattaacggcaaaaaaggatcgttcaattagtgtgaaaaatgatggtaaaaagctaattttaactgaagatggctatttgaactttacgcaggaatatgaattgactgatccagctgttggccgtcatgcagttttagcggcttttaaaaaggaatttccgcgtagtaatcgtgcgtatctgattgctaaatggtatactttaactataagaaaaactatcagtgttgatcagaaaggaagtctttttatcaatgaaatatgcagaaaaatctcccgcattatgggatgccattcatcatgaagaacagcgccaacaagacgtcatcgaattaattgcctctgaaaatattgtttctgatgcagttcgtgaagcacaaggttctgttttaactaacaagtatgctgaaggatatcctggtcggcgttattacggcggttgtcaatatattgatcaagttgagcaactggctattgattatgcaaaaaaattgtttaacgcaaagtttgctaatgtgcagccacactctggatcacaggctaacatggcagtttatcaagcacttttgaagccaggtgatgtcattttaggtatgggaatggatgctggcggtcacttgactcatggatccaaggttaacttcagtggtaaggaatataagtcttacagttacggtctaaatgttgagactgaagaactagattttgatgccattcgtgaaattgctcttaaggttaaacctaagttaattgtagccggtgcttctgcgtacagccgcatcattgattggcaaaagttccgtgaaattgcagatgaagttagggcatacttaatggttgatatggctcatattgctggcttagtagcaaccggtcaacatccaagtcctgttccagtagctgatgtagtaactacaactacacataagaccttgcgtggccctcgtggtgggatgattttgtccaacaatttagaaattggtaagaaaatcaattccgctttgttcccaggcattcaaggtgggccacttgagcatgtcatcgcaggtaaagcgcaagcattttatgaggacttgcaaccacaatttacagattatattaagcaagtcattaaaaatgctaaggcaatggcagaaacttttgctgaatcggacaatattcgtgtcgtatctggtggtactgataaccatttgatgattatcgatattactaagactggtattaccggtaaagatgctcaaaatttactcgactttgttcacatcactaccaacaaagaatcaattccaggcgatcaacgttcaccatttgttactagtgggttgcggattggtacgccagcaattactagtcgtggctttgatgaagtagatgctaagaagactgcggaaatgattattgaaattttatctgatccagaaaattccgcaacgattgctcatgttaaagaagaagttcaggcattaactaaaaaacatccaattgaataatttgtgtagcagaatttagccgtcctagttctcagctgggggcggcttttgttataataaaaaattaaaaataatggagttaagagtgaaggaaacgtgattatttggaaaaattaaaaagacataaaataggcttattttcagcgattatgctggccttgaattccttaattggttcggggtggctttttggttcaggttctgcagcacaaattgcaggtccagccgcaattttatcttggattttaggtgcagtaattatcatctcaattgcattgacttatgtagaattaggttcgatgtttcccgaaagtggcgggatgagtcgatacgctcaatatagtcatgggccgttattgggctttgtggctgcttgggctaactggatttcactagtcacattggtaccgatggaagccgtagctgccgtgcaatatatgagttcttggccctggagctgggctaactggactaaaaattttattaaaaacggcagtattacttttgctggcttaggtgtggttattatttttatgctgatttttacaatgatcaattttgggtcagttaaaatcatgacccattttaccaatttgatttctatttttaagatcttattgcctactttgacgattacagttttaattgcttcaggttttcatggacaaaactttggcagtaatttacatgaatttatgccttatggtagtcggtccatctttgaagcaacttctgtttcaggaattatcatgtcctatgatgcctttcagacggtcatcaatatgggtggggaattgaaaaatccgcgtaagaatattgtgcgtggggtattgatttcaatgttaattactgcggcaatctacattatgttgcaagtgacttttattggtgcagttgagccaggcatgttagctaaagtaggctggcatggagttaactttacctcaccatttgcggacatcgctattattttaggcatcaattggttagtaattttgctctacctagatgcatttgtttcaccatttggaacaggggtagcatttgtagctacggcctcaagagccctagcggcaatgacacacacacgtcatttgccaaaatggttaggtagattgaatcaaaaatacttaataccacgttatgcgatgattgctgactttgttttggcggttattttagtaagcttatttagaaactggaatttactagcaacagtaatcacggcctcaactttgattgcatatttgactggtccagttacggtaatgactctaagaaagaaaagaccagatcttgatcgtccatttaatcctggttatatgaagtggctagctccagttacctttatactaactagtttggcaatttactggtcaatgtggccaacgactattcaggtgataattgttattgccttgggtttgccgatttatttttattatgaaattcactaccaacattcaaatttaaaagaacaattacatagtagttggtggatgatcggttatttgatttttatgtcacttatgtcctttgtgggcagtagcggttttggtggtcagaactggattaagtatccatttgactttgtagtaattatcattatttctctcgccttctattattggggaattaagacagggttaaagaaaatcgatccttatgctgaaaaaattgcgcaaaataaagaataagtaaaaaaactgttgggatttttggtctcaacagttttttgttcgctattctgcttcatcaagatacttatttagtaccttgaaaacaccgttgtcgttattagtaggtgcaataaatttagcagtctttttaacgatatcttgaccattagccatggcataacttaaaccagcaaatttcaacatttcaaggtcattttcaccatcaccgaaggcaattaattcacttcttggcacgtctaaataagctaaaaattcctttagccctgcggctttatttacaccttcaggaataatatccatgtagctccaaccactagttgtgacgtggattttttctgtactacggctgttgaagccatgttctaattcatgtcgaatcttgctgggatagtccattgtgatcttagtgtattggtcatcagcaggaattttattaaaatcatcaatttcgatgctattaggataaaaataatgatgggaccgcttgtattctggtggtgtactttttaaaaagtaggagtgcttaacgccactgattaaaatgttttgggctgcaccaggatagcgtgcgtgcaaatattcaataaaatttaggatgcatttttttgaaaagcttgttgtacgaataatttttccatcgcgaactaagaccgcaccattgtcggcaacaaagtcaatagaatcgataaattcgctaaagtcatcagccaaacgaccagctgggcggccgctagcaataataaaatgtgccccgtgttgatgcagacgagttaaaatctcgctaaacatttgatgatcgtattgtttttcatcgttaacaaaagtaccgtcaacgtctacagcaacggccttgaagggaagagtagtcatctaattacctcactaaaatttgataccgttaacagtttaccatttcttgcaagtgcttacacaaattatttatattatgtttaacaataaatttgaaatttacgaggtagaaaaaatgacaccatggtggaaaaaagcagttgtttatcaaatttatcctaagtcatttcaggacagcaacggtgatagcataggtgacttacaaggaattattgctcgtttagattatttggaaaatctaggagttgatgcaatttggctttcaccggtctatcaatctcccggtgtggataatggctatgatatttcaaattatgaagcgattgatccgcaatatggcacgatggctgatatggatgagttgattcagaaagctaaggagcatcatatccgaattgtaatggatctggtggttaatcatacatctgaccagcatcaatggtttgtggaggcacgaaaaagtaaggataatccttaccgagactattatatttggcgtgatcctgttgatggacatgagcccaatagtttgaagtctgctttttctggttcagcttggaaatttgatgagcaaacaggacaatattatttacacttctttgcggaacaacaacctgatttaaattggaaaaatccagagttgcggcaaaaaatctacgatatgatgaacttttggcttgataaggggatcggtggcttccgaatggatgtgattgaattaattggtaaagatcccgacaaaatgatccgtgaaaatggtccgatgcttcatccatatttgcaagaaatgaacaagaatacatttggtgatcgagatgtgatgacggtgggcgaaacttggaatgcgacaccgaagattgcagaagagtactcagatccagcacgtcatgaattatcaatggttttccaatttgagaatcaagctttagaccagcaggagggaaaagaaaagtgggatttaaagccgctagacttaggcgaattgaaaaaggttttagtaaagtggcagacagagcttgattttaatcatgcttggaatagtttgttctgggaaaatcatgatattccgcgcgtaatttcacgttggggcaatgataaaaaatatcgggtgcagtgtgctaagatgtttgcgacagttttacatttgatgcacggcacaccatatatttttaacggtgaagaaattggtatgactaattgtccggtaaaaaatattgatgaagtagaagatattgaaagtgtcaatatgtatcatgaacgtctggctgaaggttatgacaaagataaactaattcatgcgatcaatgttaaaggcagggataatgctcgtcgtccaatgcaatggaatgatgagaaaaatgccggctttactaagtcaaagccatggttgacagtaaatcctaactacaaagaaattaatgtgaagaaggccttggctgatcctaattcgattttttatacttaccaagaattgattactttacgtcatgaaaatgagattgtggttaatggtgactttaagttggttcatgatactggtgatgaagttcttgcatattatcgtattttaggtactgaaaagtggttggtggttgctaacctatctggtgaagagcaacagtttacgtcgaccgatcgcattaaagaaaacttgcttagtaattatgctgtgcgtaatgatctgcatgatattacgcttaagccttatgaagcatttgcagtggcaattaaataagctaaaattaaaaagaacttgaattactaacttgaagatgttattctagttatcgttaatcgattaatctatgatctgtgatatgatcatggcaaaggagtaataaattatgaaacaaggtattcatccagaatttcaagaagtagttttcatggactcagcaactggtgctaagttcttagctggctcaactttgaagccatcagaaactattgactacgaaggcgaaacttacccattagtacgtgttgaagtttcatcagattcacacccattctacactggcaagcaaaagtttgctcaagcagatggtcgaatcgaaaagttcaacaagaagtacggtttgaagaagtaaaccttttatctggtggaagcagtcccattggggctgcttttttcgttagagattatttggcagaatgcatgaaagacagtataatgttttctgtataaaaatgtttttatgggagtaaatattcaatgaaaatgcaaatggcggaaattgccaaggctttaaatactacttgtgaaggtgacaatcaaactgttattacttctgttgcctttgactccagaaagatcacagatggtggattatttgtaccacttgaaggtgaacgtgatgggcacgaattcatagctagtgctattaataatggtgcttctgctactttatggaaaaaggggcatccgaacaagccagaagatattgcggttattgaagttgatgatccgcttgctgctatgcaagagcttgctcgctattatttgcgtaaggttaatccaaccgtagtgggaattactggttcaaatggtaagactactaccaaggatatgattgctgctgttttgtctaaacgctttaatgtacataaaactcaggccaactttaacaatgagattggtgtgccaatgaccatccttgagatgaagccaaatactgaaattttggtgcttgaaatgggaatggacagaccaggtcaattgcatcatttaagtgaattaacccatccagatgtggccgtaattacaatgattggtgaagctcatattgaattctttggcagccgcgacaagattgcagatgctaagatggaaattactgactttttgcgtgaagatggcgaatttatcttcaatggggatgaaccattattgcaagaacgtgctgagaaattggatcaagctaaagcaacttttggttttagagatgaagatacagttcatgcaactggctttaagagttatatgcatcatgctacctttacagttaatgattcagagcaaaaattctcaatcccaatgattggtaaacacaatgtttctaacgcaatggccgcaattagtgttggtcgtcattttggtgaaagtgatgaggaaattgcctcatcattgtctaactttaccccaacggctaatcggatggagtgggaaaaaggcgatgctggcgaaagcatcatgagtgatatctataactcaaatccaactgctgttagagctgtattgactagttttggccaagttgaagtaaaagatggtggtcgtagaattgctgttttaggtgatatgcttgaattaggtaaaaagtcgccggaattgcatgctggtcttgcagatacaatggatccccagattattaacgaagtttacttatatggctctgaaatgaagaatttatatgatgctttacaaggcaaatatgagccagaacatttgcattattatacacaagaacaaacagatcgaatgattgatgatctgaagaacgatattaagtcggatgacattgtagtattgaaaggttcgcatggaatgcacctagaaaatgtcttagcccgactgagataggagaaaaatttttttgaaattttcagaattaggattaaatgatgcgcttcttaaagcgattaaacgttcaggctttgaagaagcaactccaatccaagaacaaactattccccttgctttgcaaggcaaagatgtaattggtcaggcccagactggtaccggtaagacagctgcgtttggcttgccaattttacagatgatcgacaaaaaagaaaaagcaattcaagcggttattattgaaccaacgcgtgaacttgctattcagacgcaagaagaattattccgtttaggtcgtgacgaacatgctcatgttcaagtggtctatggtggagctgatatcggtcgtcaaattcgctcattgaaacaccatgtaccatcaattttagttggtacgccagggcgtttgcttgaccacttgaaacgcaaaactattaatttagatcaagttaaggctgtcgttctagatgaagcagatgaaatgctcgatatgggttttattcaagatatcgaaagtattttgaaatatgctaagaaccgacaacagacattactctttagtgctacaatgcctaagccaattttgcggataggcgaaaaatttatggatcacccagaaattgtccgcattaaagctaaggaattaactgctgatttgattgaacaatattttgttcgtgctaaagagtctgaaaaatttgatattatgtgtcgactaattgacgtgcagggtccagatttggctttagtctttggtcgcaccaaacgtcgcgtagatgaacttacgcgcggtttgcaagcgcgtggctacaatgcggcggaaattcacggtgatctatcgcaagcgcgtagaatgtcagttttgaaaagatttcgtgaaggtaagctagatattctggttgctactgatgtagctgcccgcggacttgatatttcaggcgtaacccacgtttataattatgatattccccaagatccggattcatatgttcaccgtattggtagaactggtcgtgcggggcaaaatggaatctctgttacttttgttacgccaaacgagattggctatatgagaaccattgagcaattgactaaaaagaagatgtcgccgcttcgtccgccaacagatgatcaggcattacatggtcaattaaagcaagcaaaaattgaaattgaagatttgatgaacggtgatttgggtaaatatacccaaggggcaagtgagctgctggataactattcagctctcgacttagttgcagcctttttaaagaacttggctaaagatgaggttaaagtcaagattaccccagaaaagccgttaccatacaagggtgatggtcgccgccgtcgtggtaaaggtcatggccgtagcaataataatcatggacgcgataaccaccgccgtcgtaacaataattcataccgccaaaatggaaaccgcggtaagcgtggtcgtggcaacggacatgaatttgtaatcaagaataagaaagattaagattttatcttaaaaagggaagttgtaatttttacagcttcttttttgtattataatgatgtcattgtgtgaggtgaaaataatgattaaaggagtaggaattgactcgattgaagttgaacgagttaagaagatcgtggacaagggggatgcttttgccaaaaaagtattaactcccaaagaatttgatcaatatcaaaaaatggcaggcaaacgtaaagttgaatacctaggcggacgcttttcattaaaggaatctttttctaaagcaatgagaacgggtctgggaaagtatattggttttcaagatgtcgaaactttatgggatgatttaggtcatcccgttatgacttcaactaagtttgatggaaatattttcccaagtatcacacatgataatcatgaaattattacatttgtagttttggaggaaaaataaaaatatggttccaggctatcaccgtccagccgttgtaaaggtaaatttgggcgcaattagaagaaatataaaaaacgaaatgaaacatcttgcaacagggcaaaagatgttagctgtagttaaggccaatgcttatggtcatggtgcagttgaggtggctaaaattgcgattgaggaaggtgcagcaggcctttgtgtagctattttagatgaggccttgcaattgcgtcatgctgacattgttaagccaattttagttttgggagtagtttctccagaatacgctccaattgcggccgcaaacaatgtttcattaacgattcctaaccttgaatggctaaaggaagcagaaaagtaccttgaaaaagagcagttacagttgaaagttcatattggagtagattcaggcatgggtcggatcggctttaacgaagatgaggattttattgctgctaataaattcttacaaaataacgataatttctacgtagagggtatgttcgcacactttgcttccgcagacagtgctgatgatacttactttaagcatcaggtagaaaaatttgctcatatgagaagtttgttgacagttaagcctaagtggattcacgtagacaataccgctgccagcatctttaacaaggatgtgcctagtgattgtgttcgttttggaattggcatttatggtttgaacccatcctctaatcctgatagtcctgacttgaagtcatcaatttcgcttgaaccagcattatcatttgagagtgaactaactcatgtaaaaactattcatgaaggtgacggagtaggatatggttctacctttgtagctgatcaagatacaattattggaactgtgcctgttggttatgctgatggctttattagaaagtttcaaggctttaaagttaaagttggagacgaatactgtccaattgtcggccgaatttgtatggatcaatttatggtcaaaatgccaaagaaaatgccgttaggaactaaggtggtcatcatttccaatgatccaacagcgccaaataatattaaggccgccgcagattatgttgatactattcactatgaagtagcatgtttgttaaacgatcgtttacctcgtgtttactatgaaaaataagttaggcaataaaaaaatgcttctagaacaaaaatctagaagcattttttggtagatcagttttttaatccttaacagggtgttcaataaagacacctggattttcgtcactcataatagtcatgccggcttgcaaatcttcgatttcagaaactacgaaaccttttctttgtaacttatcaacaatcgttctcatggtaatatctgagacaccagcggggagagtaaagagtgttcttctaacaaaattaccttcgagttcgccagcagctgcatcaagtgtcattacactagacatattagtgtgcttagacacaatcttggacatcttgatcaagttaccacgtgtattgtcagataaaacggtcaaaacgtatgaaccatttttaacatcccacgcatctgacaacatatcaagcattcttgagtgagtaagaataccataaaaatgattatcttcatcaaggacagcaatataaggtaagtccttaatgttgaaaaataccttgaagaatggtgaattgaccttaattgtcttagtggcattcttaagtaagtaagttactggtagattcatatcgccaccttgtgacttatgacggtagatatgcatcttataaatgttaccacggaaaatagtaccagtatcgtcaacgattggcacacatctgtagcctgaatcttctaaaacttttaaagcttctgctaatgtggctttttcattaactgttgttaaataatcttttttaataactaaagatttaataagcatgagttcgcctccgaaagtgagaaatgtttcaagtaattatagcatagttgatgagttaattaaatattaattaaagttcatctgaagtaacaactatattttaacaatagttagacaaataaaaaagcatctccgaaaaaagagatgcttttaagtgaaacaagttttagattattgacgaaccttaacgccagtttccttaaatgccttgtccataaccttcttcaattgatctgcagaagcagtcatcaattcttgttccttgtcacttaatggcatttcaatgatttgttcaagacccttacggccaacaactgcaggagtaccaatgtgaatgtcatgtaagccatattgaccgtccataggaactgaaagtggaagtacacggtgttcatcgttcaagatagccttagcgatcattgctgaagcagtaccgattccgtagaaagtagcacccttcttgttaattatttcgtaagccatgttagcaacttccttgtggatgtcttcaagcttagattcatccataccgtgagccttaacccagtcactaacctttacgccaccaacattgttgtagctccatgctgggaattcagtatcaccgtgttcaccaagcatgtaagcattaactgaacgtgggtcaacatgttccatttcaccgataaccttttgaagacgaccagtatcaagtgaagtacctgaaccgataacacgatccttagggaaacctgacattttccaagttgcgtgggttaaaatatcaactgggttagcaacaactaagaaaataccttcaaagcctgattcaacaactggttcaacgattgatgataaaatcttcaagttcttgttaacaaggtcaagacgagtttcgcctggcttttgtggagcaccagcagtgataactactaagtctgcatccttacagtcagggtagtcagctgcatagatattctttggtgaagtccaaggggtagcatcagctaagtcaattgcgtcaccttcaacgtgttccttagcgatatcaataatacccaattcttcggcgataccttgttgtaccattgagaatgcgaaggttgaacctacagcaccatcaccaacaagaataactttacgaggtctttcatctcttggcataaataaaaatctccttttttattagtgatatttttaacaaaatgaattataccatgatagcaagcattaataaaattattatttcctaattgtgctattatatgtaagattgtgtgcatagtgaggagtaaaaataatgaagataattgcaggtttaggtaatccaggacaaaaatatgataaaacaaagcataatactggtttcatgacaatggatcattatttgaatgaaaagggtttgtcactggataaagataaatttgaaggtcattggactaagcaaaaaataaatggtgaagatgtaattttgcttgagccgcaaacctttatgaatgaatcaggtcgttcagttagtcaagtggctaacttctttaaggttgatccagcagatgtgctaattattcaagatgatatggatatgccaattggtaaaattagaattagagctaatggcaaatctggtggacataatggaattaaaagcatcattcgagatttagggacggaaaagtttaatcgtttgaagattggtattcgtcatccgaaaaatgcaacggttgtttcatgggttttgacaccatttaatgatgaacaacaaaaattgatggatgatgcatttgcgataagtgtagatattattgacgactttatcagcggacatggtagtcaatatttaatgaataaatataattaaaatgcgtttaacagagattttagataaagatcaagatttaaataattttatttcaaaaacaaaacaagtaaaaaattcactaatcactggcgctaatgccggtgcttttagtctattgctaaaacagataacaactaaattagcagctccacttattttaattgaagaaaacgaaagtaaagcacaaaacttatatggtgaactcagtgccattatggcagatgaaactgtgcaaatttttccagtagatgctacaattgcaacgcaaacggcagttagttcgcctgatgaactgagcagccgaattcaggcacttaattttttgttaagtggtaaggcaggaatagtggtaacaacgccgcaggggctgcaatacaaactgaccaatccaactgattttgcgcaggcaaagcggagttttgagccaggtcaagaatatgaactaaaagaactcaatgaatggttgcttgcttcagggtatcagcgtgattctttggtagcacggccaggcgaattcgccatccgtggtgatattttagatgtttatccactagatcgagaaaatcccgtgcgaatcgaattctttggtgacgaaatagatacaattaaggaattcgatttagctagtcaacggagtcaaaaagagttagacaaagtagaagttgcagcagctcaagatcgagtttttactaaggatgcaattgcggcagcggctaagaaaattgaacaagatatggccagtgcaccagctcccgctaaagctgtcaaggaccactttgcggcagttcttgatgaattaaacgatggcggtttacctaaaaactatgctttcttaattgactatttgcttgaaatttctagtagtttactcgaatatttgcctaaaaatgggcagattttattttacgatttgcctttaattaatcaagcggttgaaacagttgataagcaaaacgctgcttttattaatgatgaactaaaaactggtgcaatgttgccagggcaaagcttgcggtcagattatacaaagattctgagcaaagataagcaccatcgtatttatttctcattgtttcaacgaagcatgggacgactgcgcttaggccagatgctcaattggtcaacacgtgagccagaacaattctttagtcaaatgccgctgattaagtcagaattagaatcttatcaaaaggcggggcaaaccgtcattttacaggctgataatgaaaaaagagcacagcaaattgatcaaacaatggttgattttggcttaaatttaccaattgttggtgcagacgaaattgttgaacaacggacacaaattgtagttgatggctttgttagtggctttagtttaccaacagttaaattggtatatctaacggagcgtgaactatttaataagcgcccacaacgtaaaaaaagaattaagacactggagaatgcccagcgtttgcgcaattatactgaactgaagccaggggattatgttgttcatgttaaccacgggattggtcggtttgaaggaatcaagactttagaaaataatggtaccaagcgtgactatattacgattacctaccagcatggtgatcagctttttgtaccagcagatcaattaagcttagtacaaaaatacgttggttcagaaggtaagacaccacatattaataagctaggtggtagtgagtgggctaaaaccaagcgtaaggttcaatctaaagttgaagatattgcggatgatttgattgaactttatgccaaacgtgaatcagaaaaaggctttgctttttcacctgatgatgatctacaaaaacaatttgaagatgcctttccttatccagaaacacctgatcaattgcgatcggttaaagaaattaagcaagatatggaaagctcgaagccaatggaccgtcttttagtaggggatgttggttttggaaaaactgaggtagccttacgagcagcttttaaggcaattcaggataataaacaagtagcctttttagtacccaccactattttggcgcaacaacactatgagacgattcaagatcgcttcaaagatttcccagtcaatactactatgctatctcgttttcaaacgccagttgaatcaaaggaaattattgaagggctaaaaaatggcaagatagatttggttgttgggactcaccgtattttgtctcaagatgtaaaattcaagaatctaggattgttaattgttgacgaggagcagcggtttggcgttaagcacaaggaaaagttaaagcagttgaaggcaaatattgatgttttgacattaacagctacgccaataccgcgaacgcttcatatgtcaatggtaggtgtgcgtgatctctcagtaatggaaacgccacctcaaaacagataccctattcaaacttatgtgatggaacaaattcctagtgtagtaagggatgcatgcttgcgtgaaatgcaacgtgatggacaggtcttttatttacataatcggattagtgatatcgatgaaactgtcgaaaaactgcaggaattgatgccacaggcgcgaattgcagctgcccatggtcgaatgagtcagaatcagttggaagatattctttatcgcttcctgaatcgcgagtttgatatcttggttacgactacgattattgaaacaggaattgatatgcccaatgtcaatacaatgatcattgaagatgctgaccactatggtctaagtcagttgtatcaattgcggggtagaattggccgtagtgctcgtttggcttatgcttacttcttgtataagccaaataaagttttaactgaggttggtgaaaaacggcttgatgcgatccgtgacttcactgaactgggttctggtttcaaaatagcaatgcgtgacttatcaattcgtggtgctggaaatatgctgggtgcacaacagcatggctttattgatagcgttggttatgatttgtactcacaaatgctggctgatgcaattcaagaccgtaaggggaagacaacaatcaaaaagtcaaacgcagaaatcgaccttggacttgaggcttatattccagattcgtatatcggtgatcaagaagaaaaaattgaattttacaaaaagattaaagccgtctcaagtcaggaagaattaggtaaaattgaagatgaattaatcgatcgttttggtgactatccaacggccgtcgagaatttattagctgttgccggtctaaaggttgatgctgacatggctcaagtgctcaatgtggttaaaactgacgataagattaaagtggaatttacgaatgcagcttcacgcaaacttgagggacctaatatttttaaggcattggagcatgtaagtttaaaggctcgcattagtatgaatcaagaaaaaagaatggttgtcttgctattgttgccggataaaatgaagaatcgtgttttattcaatgaactagcaacctttttacaggcagcaagcgacattgtacaaaggtaactgtaggagaaaaatatgaggattgataaatttttaaaagtttcacgattagttaagagaagaaccgtagctaaagaaatggctgatcaaggtagaatcaaagtcaatggtcgagttgtaaaatcaagctacgatgtaaaaattgatgatattattgaagtaggttacggcgccaaaaccatcaaggctaaggtgttaaatattcgcgagaccacgaaaaaagcagaagcaagtgaactgtacgagctagctaagtgtataattttttacggtaagttgaataaataattaaaaaagcccaagtcctttgaatttggacttgagctcaaacaaaaagaccagtagtctgatgttaagaacaaaaaacacattagaagctggtcttttatgaattcaattgtaactgaaatcgcaaatattataaagtctgaagataattatattaagcgtgaaagaaaaataatctgtttcttcttaaacctgattaaggaaatcatggccttggctttagctaaagttgatgatgaaatgattaccaaggttaaagcacagggctatcagattgataagaagaatgagcgctcaatcaatatggcttttggcgaagttaggtatgtcagaagaagatatgtctgcccaggcaaacaagcaaggtatcccttggatgaattaatgggctttgacaaatacaagcgctacagtattttagcagtcaaaaacatcttagaagtaagcagcgttgccacttatcgcaatactgctctagcagtcaattgcctgtctggctttaatattagccatatgcaggtgggcaatttggtaaaaatggccgggaaaaatattaaagcgggccaagaagcagattcaagatatgatgccgcaggcactaagaaaaaggtcccagttttgtatcttgaaggcgatggcgtggtgatcaaaggcactaaaagccggttggaatttcatcgctatcaggtctgtgaaggcattgtcaatataagcaagaaacgcagaaagcgaatcaatgccaaggaatttgtttctttaagccgacttgatgcgctgaacgaagccaaggagtacctggccaatacttatgatctttctgatactgtaattcttagcaacgccgatggcggtgctggatatgccaaaacagacttcgatgacattgtagggctatgcaagcgtcatgagcatttcttggatgtctttcacctaaataagaaaatcaaagaaaggctatattttgcgcctgacctgcaaggcaagctgatttctgctttggaatacaaatacagctatgacaaagttaaaactatcctaaccactgcagaaagccgactaattgatgaattgaataccgagctcaatcatgattatctggggcgcctaaggaattatattgatcgtcattgggacgatattaagccgtttaagaaacgaaaactgactgtgactaaagccattggctgctgcgagagcaaccaccgcaagtatacctaccgtgttaaggggcaaggcaagaaatggtcaaaatctggagcagaaggcatgcttaggatcttaagctgcatcaagaatcgagagctggaattttggcttagcagcgagtttgaagattcagaaataactgtattgactgaacaggaattaaaagcagcggcccgtgacagcttaaagaagcgtcatgaagttcatttaggcatccagcatggcgcattaaccgcacaggtagctggcaatagttatttaagcaagctaagcagaaatttaagtcatataaatatttaagaaattaaggttagactaatggtttaaaggctaccgcaaaaacattgacacttacacgagctagttgattaatgacttttgattaaatcgttgttatacttgacttagtatagttatttagtaattaggggattaaacaatgaatcatggtccacgtatatataattcgttgagtccagaagagcagagggcgcgtcttagacgtaaacaggctaaattagagaaagaaacacaccgcaagcggttgaacgtaattatggcagtttttgctatcattttcgttgctttaggtgtacagattgcaatcaagatttctcaaactggacgactgaataatcaagtacaagctgaaaaacagactttaactaaagtaaaaaataagagaaatgacttagaaactgaaaagcaggatttgaaggatccaaattatgttgctaagctgattcgttataaattctattattctaaatcaaatgagaagatttataacgtgcatgaaagaaatgatgataactaatggaaaagtatcaagctggtaatcgggtgactggtgtaattaataacattactgacttgggcatctttgttactttacctaatcggcattctggtttggttcatcatagtgactttggcaataattggctacgcgaacgtcgtcgttatcatgctggcgatgaagtgcgcgtggttgtggtgcacatccataaagggagatttaatttatcgatcactcgagtgaatgatccggaattagttgaccatgataatcaattttctaagacaaagccagctgattttgatcaagtcctgaatcaaacaacgcgggatgctaaagaagaaattgaaaagctaaagcaagtattaactgagaattaagagatggtccgaaagggccattttttgttagaaaaataatgaaaattaatgatttttttgaacaacatcagattgacttaaaggataaaagactattagtagccgcaagtgcgggaccggattccatggctttactagatatgctagttaatttgcaaaaacaactaagttttactgtttttgcggcacattttgatcatcaattgcgtgcggatagctcatatgaagtagaagttttgcaaaattattgtgctcaaaagaagatttgcctgtttaatggcaagtgggataaacatgatcagccccaaacgggaattgaggcagcggcgcgagaggcacgatatcattttttgactaatgttgctcatagcgagcgaatgaactatttattaactgcgcatcatggtgatgatttgctagaaaatattttgctcaaatttattcgctcgggaaatcctgaagagatgaatagtttgcaagatatcggctctatgcatggcgttgttttgcttagaccactattagcctatagtaagcaagaattactcgaatatgatcaagagcgtgaaattgactatgtaatagattcaactaatacggaggatgagactgttcgaaatcgactgcgtcatcatgtggtgccattattaaaagaggagaatcctaatttaattagtaatgcactgcgttttagtgaaaaaatgagtcaattgacggatttggcggatgagcagttgaatagtatgagaacggttgagccatttttgggtgcttggcgaattaaaacggacaacttaaatgatttatctacagaagaaaaaaatattttttggcaaaagataatctggcaaaaatatcatcgccgggtaaatgaaaatttgggcaattttgaggtgattgattatcaaggttatagttatttagttgaaaataagccacagaaaattgtgcagccatttagtatcgaactaaatcagcaatttgaattcaacggagcttattatttactaactactgataggcaagctgatttgaaagaaataggaagcttttggctggaaagggatgcacattttactgcgggaagtctagtacctgctagcaaattattgttgaaaaatggtcaacgagttaaggcgaaaaagaaattttcagaaaaggcaattccctttgccttgcgctcttgctgcattacaatttatgctgaaaatgaacctgtttttgtagaaaaatgttatcaaaaacaggactttatcacagatggtaaacattatttcctatacatttattaagaagtcttcaaaataggtgaaaatgttagtggttgcaagctaatttgtgatagaattttaaacgtataacttaaagactttgcggaggttttttatgaagaataaccggaatcggctactttcaaacggccttttctatatagttgtgttccttctgctcctatggggaatcaactgggcactcggcggctctaacaatagtggtagctcagagaatatcagttactcacaatttgttaaagatttgcgtcaaggcaaagttaaaaactttagtgttcaacctgctaatggtgtttacactgtttcaggtagttacaagactgcacaaacaacaaagaatcaatcaaataatagttttgatttctttagtaataattcaagtagaaaagtttcgcgcttctctactaccatgttacagaatgattctaccgtttctaacgtgcaaaacttggcacaaaaaagtaatgctcggatgacaactcaaggagaatcacaatctggcaattggatttcgaccattgtcatgcttgtgccaaccgttttgtttatcgtcatgctttggatgatgatgaaccaaggtggcgctggacgtggtggtggcggcggaataatgaatttcggtcgttcacacgtcaagccagaagatccttctaagaataaggttcgtttctctgacgtagccggtgaagaagaagaaaaacaagaattagtcgaagtagttgaatttttgaaagatccatctaagtacactaagttgggtgcaagaatcccatctggtgttttacttgagggtcctcccggtactggtaagactttgcttgctcgtgctgtagctggtgaagctaacgtgccattttattcaatctcaggttcagacttcgttgaaatgtttgtcggtgttggtgctagtcgtgtacgtgacctgtttaacaatgccaagaaaaatgcaccaagtattatctttatcgatgaaattgatgccattggtcgtcgtcgtggcaatggcaccggcggtggtaatgatgaacgtgaacagactttgaaccaattattggttgaaatggatggttttgaaggcgatgaaggtgttattgtcattgctgctactaaccgttcagacgtcttagacccagctttgcttcgtcctggtcgttttgaccgtaaggtattggtaggtcgtcctgacgttcgtggtcgtgaagctattttaaaggttcacgctaagaacaagccgcttgcacctgatgttgatttgaaggaagttgcccgtcaaactcctggctttgtaggtgcagatttggctaacgtcttgaatgaagccgcattagttgctgctcgtcgtaatggtactgagattactgcatcagatattgatgaagccgaagaccgtgtgattgccggtccagctaagaaggatcgtttgatttctgaaaaagaaagaagacgtgttgctttccacgaagctggtcactcaatctgtggtttggtcttaagcgactcacgtactgtacgtaaagttactatcgtacctcgtggccgtgctggtggttataacatcatgttgcctaaagatgatcaattcattttgactaaaaagcaattatttgaacaaattgttggtttgatgggtggtcgtgcaggtgaagaagcaaccattggtgataagtcaactggtgcttctaacgactttgaacaagctactcaaattgcgcatagcatggtagttaactatggtatgaccgaatccttaggtatggttgagcttgaaaaggaaggcgaaagcaatccttacggctttaagccatatagtgaagcaacttcagctaaaattgatgaagctgtaaagaagattttggatgaagctcatgctaaggcccttgagatcgttaaggacaacaaagaaaagcatagaatcattgccgaagctttgctcaagtatgaaaccttgaatgaaaagcaaattatggccttgtataagactggtaagatgcctgaaaaagacgaagatgaatatccgagtgaatcaaaggcttcaacttatgaagaagctaaggctgctgcagagaagcgcgaagttgaaaaggcagaaaaaaaggattcagatcaagcattagctgatcaagaaaaagataccttggagactccatctgaaaagaatcatgaagttgaagaaaataatcctgagaatcccgaaaaggatcaatcagaaaatgaaacttcaactcaagatactcctgcagatgatgagcataaagacaattaaataaaagtagggcctgtcacaggctctatttttttagaaaagaaggataaaaatgagtgattatttagtaaagtcaattgataagactaaaaacttacgcttgttaaccattaccgctaagggtgtagtgagtgaagcacaaaagcggcatgacttgtggtcagcttcagctgctgtgcttggtcgtactttagtaggatctcttttacttgctggtgcagaattgacagataaggaagaattgacagtccgtttattaggcaatggccctgttggtccaaccatcgtgacagctacctccgatttgaaggtaaagggttatgttaagaatccacatattgctttaccacctaagaaaaatggtcatattgatgtgaaaaaagctgttggacaaggatggtttgaagtaactaaggaccttggcttgaaggaaccatacacaggtcaggtaccaattgtttctggtgaaattgctgaagattttgcttactatttgactaagtcagaacaaattccgtcagctgttggtttgtcagtatttgttaatccaaataattcaatcggtgaagctggtggctttatgttgcaagcacttcctggtgctagtgatgctttgatcgatgaaacgattaagcgaattgatgcattgccagcactctcaacttcatttttggatggaatgacaccagaagacttagcacgtaaaatcttaggaaccgattgtaagattcttgaaaaagatgatgtagcctttaactgtgattgttctaaagaaaagtatgctggtattttggaaactttgaagagcgatcaattgaaagcaatgattaatgaagatcatggtgccgaacttacttgcaatttctgcggtaacaagtatcattattcagaagatgaattgaaagatattttagctaaaaagaacaaagataaagattattaaggcaaataaagccctaaggttttaaccagcggggcttttttgatatcataatagggtaattttgaaaggatgatttggtgaataacagctggaaaattcgcgatatcaccattccaaaccgagttgttgttgcgccgatggcgggagtttcaaactctgcattccgcgttgtctgtaaggaattcggagcggggctggttgtctgcgaaatgatttctgatcatgggatcatttatggaaataaaaagacattaagtatgatggatgttgatccgcgtgaacacccaatgagcattcaaatctttggcggaagcgaggaaactttgcttcaagctgctcaatatattgatcaacataccgatgcggatattattgatattaatatgggttgtcctgtacctaaagtaacaaagactgatgcaggttcgaagtggctacttgattcaaacaagatttatcagatggttcacgcagtagtgcagaacgttaaaaagccggtttctgttaaaatgagaacaggctgggataaaaagcatatttttgctgtagaaaatgctttagctgctcaagaagcaggcgcaagcatgattgcgatgcatggtagaacacgtaaacaaatgtatcaaggtgaagctgactgggaagtattacatgatgttgcccaggtgctagatgtgccttttgtggctaatggtgatattagaacacccgaattagctaaaaaagcattggatgagatcggttgtactgcagtaatggttggtcgcgctgctttaggtaacccttggattttgaaagatatggtacactatctggaaactggtgaaaaattgaagccgcaaactgttcgtgagaaggttgaaacggctaaacatcagcttcacgcacttgttaaaattcacggtgaaaagcgtgctgtaccagaatttcgtcagcaagccgcgtattatttaaagggaattccccgttcagcccgtactcgtgctaaaataaatgaggtctggacgcgtcaagaagtatatgatttgcttgataattttgttgacgagtatgaaaaaagagaagaagctcgtgctgcacgacgcgcgacaatgaacaaataaatggaggaaaagtaaattggcaaagaatgaaatgaatgaccaattaatagttcgtcgccagaagatggaagaattacgtgaaaacggaattgaaccatttggtcaaagaaaatttgatcgtcaagatttggcaagtactttagaagaaaagtatggcaacgaagataaagaagaattaaacgctgatatgcctaagaccaagattgcaggtcgtatgcttgcaaagcgtggtaagggtaaggttggttttgctgatctttacgaccgtactggtaagattcaaatctatgtacgtaaggatattgttggcgaagataactacaagatctttaagaaatctgatattggtgatttcttaggtattgagggtgaagttatgaagactgatactggagagcttactattagagcccttcacgtaactttcttatcaaaggctcttcgtccattaccagataagtaccatggtttaaaggacgttgaggcaatttatcgtcaacgttaccttgatttgattaccaaccatgatagttacatgcgttttgttcaccgtacccaaatcattcaagctattcgtgactacttaaatagtcaaaacttcttggaggttgaaactccagtacttcacaacattcctggtggtgctgaagctcgtccatttattactcaccacaacgctttggatattaacctttacatgagaattgctttggaacttccacttaagcgtttgattgttggtgatatggaacgtgtttacgaaatcggccgtgtattcagaaacgaaggtttggacactcaccacaacccagaatttactgaacttgaaagttacgcagcatactgggactaccatgatgttatggatgaagctgaaggtattatccgtgctgcagctaaggttgtttcagatgacggtaagatcacttaccaaggtactgacattgacttaggcaagccattccgtcgcgttcacatggttgacttgatcaaggaaaagactggcgttgacttctggaagccaatgactcttgaagaagcaactaagattgcggaagaccacgacatccacgttgaaaagttctggaaagttggtcacattattaacgccttctttgaaaagtactgtgaagaaactattgttgacccaaccttcgtttacggtcacccagtagaaatctcaccacttgctaagaagaatgctgacgatccaagatttactgatcgtttcgaaatttacatcatgggtgaagaatacggtaacgccttctcagaattgaacgatcctgacgaccaacgtgaacgtttcgaagctcaaatggaagaacgtgaagcaggtaacgacgaagctgacatgatcgatgaagattaccttcgtgctatggaatacggtatgccacctacaggtggtttgggtatcggtattgaccgtttggtaatgcttttgactgatgctccagctattcgtgatgttcttttgttcccaacaatgcgtccagaacgtgttgaaagcgtagaagctgaagttaaggctgatatggaaaagaagaataaagaaaataagtaatcttataaattaaaaaactcttatctatgttttaagcatggataagagtttgtgtttatatattttttaattgagaatcattttttcatcagagtattttttaggatcatttaaatcccattgctgatatctaacttcttgacacttaaagcctaattttttgtaaagctttttggccttagtattttctgcaaatacatcaagactaactggtcgactcatgtatctcaaagctgtcgttgctaaagcatacccgatacctttattttgatgaattggatctacataaatgtaatccagttcttggggatgaactgcaacgaagcccaatatgctgtcagcatcataagctacataaattttgcaggagaaaaaatcatccttatatggagctgtctctaaaggtatgaagtatttttccgcaccaccaattgttagctcttctttacgactaacgtcgtgaatgcgacatacttcagcataatcgtttggttgatattctctgatattaaattttggcatgtttttctcgcttcctaatattaagattttgatttagaaagcaatagtacgtaatctcatgtgaaatctcctttaattaaattgaagatattatagcaatttttttaattcggtacaataactaaaattaacttagttaaaaacagataagtaatattttttcaaaaagtatttgcaaagagaataatctttgctataataatttttgtatcgcggaagtagttcagtggtagaacatcaccttgccatggtgggggtcgcgggttcgaatcccgtcttccgctccaagatgaagagctcacgaatgtgagctttttttgtgcctaaaataaatttatcttttttgataaaaaggtcttgcaaagaaaaatgtatttgctataataatatctgttgtcgcggaagtagttcagtggtagaacatcaccttgccatggtgggggtcgcgggttcgaatcccgtcttccgctccaagatgaagagctcacgaatgtgagcttttttgtgcctaaaataaatttatcttttttgataaaaaggtcttgcaaagaaaaatgtatttgctataataatatctgttgttgcggaagtagttcagtggtagaacatcaccttgccatggtgggggtcgcgggttcgaatcccgtcttccgctccaagatagaaggctcaccaagtggtgagtctttttttacgggaaatagctcagtttggtagagcgctacgttcgggacgtagaggtcgccggttcaagtccgattttcccgatatacaagctatccgtttgggtagcttttttctttttgttataatatcttttaaaacttaaagggagattaaaaatgacggcaactactgaagaaaaatacaaattattagtggagcaagctagagctttgattgagggagaagatgattggattgctaatacagctaatttatctgctcttttgtttaattcgttaaatgatgtgaattttgcaggtgtttatcgctatgaaaatgatgaactgatattaggtccatttcaggggatgccagcatgtgttcatattcaaatgggaaaaggtgtttgtggtacggctgcacaagcaaaaacaacgcagattgttaaggatgtacatgaatttgctggtcacattgcttgtgatagtgcttcaaattcggaaatcgttgtcccaatttttaatcagggaaaactttggggcgtctttgattttgattcgaccaagctactaagcgtataattttttacggtaagttgaataaataattaaaaaagcccaagtcctttgaatttggacttgagctcaaacaaaaagaccagtagtctgatgttaagaacaaaaaacacattagaagctggtcttttatgaattcaattgtaactgaaatcgcaaatattataaagtctgaagataattatattaagcgtgaaagaaaaataatctgtttcttcttaaacctgattaaggaaatcatggccttggctttagctaaagttgatgatgaaatgattaccaaggttaaagcacagggctatcagattgataagaagaatgagcgctcaatcaatatggcttttggcgaagttaggtatgtcagaagaagatatgtctgcccaggcaaacaagcaaggtatcccttggatgaattaatgggctttgacaaatacaagcgctacagtattttagcagtcaaaaacatcttagaagtaagcagcgttgccacttatcgcaatactgctctagcagtcaattgcctgtctggctttaatattagccatatgcaggtgggcaatttggtaaaaatggccgggaaaaatattaaagcgggccaagaagcagattcaagatatgatgccgcaggcactaagaaaaaggtcccagttttgtatcttgaaggcgatggcgtggtgatcaaaggcactaaaagccggttggaatttcatcgctatcaggtctgtgaaggcattgtcaatataagcaagaaacgcagaaagcgaatcaatgccaaggaatttgtttctttaagccgacttgatgcgctgaacgaagccaaggagtacctggccaatacttatgatctttctgatactgtaattcttagcaacgccgatggcggtgctggatatgccaaaacagacttcgatgacattgtagggctatgcaagcgtcatgagcatttcttggatgtctttcacctaaataagaaaatcaaagaaaggctatattttgcgcctgacctgcaaggcaagctgatttctgctttggaatacaaatacagctatgacaaagttaaaactatcctaaccactgcagaaagccgactaattgatgaattgaataccgagctcaatcatgattatctggggcgcctaaggaattatattgatcgtcattgggacgatattaagccgtttaagaaacgaaaactgactgtgactaaagccattggctgctgcgagagcaaccaccgcaagtatacctaccgtgttaaggggcaaggcaagaaatggtcaaaatctggagcagaaggcatgcttaggatcttaagctgcatcaagaatcgagagctggaattttggcttagcagcgagtttgaagattcagaaataactgtattgactgaacaggaattaaaagcagcggcccgtgacagcttaaagaagcgtcatgaagttcatttaggcatccagcatggcgcattaaccgcacaggtagctggcaatagttatttaagcaagctaagcagaaatttaagtcatataaatatttaagaaattaaggttagactaatggtttaaaggctaccgcaaaaacattgacacttacaccaagctagctaattttgacgaaattgataaaaagtatttaactgaaatagcgaaagcaatttttgcgtaattattagaattggacataatgaagttgaagataagtcaaattgttttacttactgacaaaagaaaagtaaaataccataacgtattttaaagggtggtgtttgtatggaaaattcatatagtaagagcgttaatcaagtattgaaaattgcacgtgaacaagcacaaaattttcatcatcgcttgattggcacagaacatgttttattggctctagtaattgaaactgacggtgaagcaggaaaaatcttgcgttcatggggattaacaccaactgcagtacgtgaagaaattgaacgttatacaggttatggctctgcccctaaggcaagctacatggaaatgtcaccacgtttgagtttagcttgggattatgctagaagacgagctaatgacgatggagttaaggaagttaacactaatcatgttttgctgggaattactgcaagtgagcaggttttatcagcaatgattttgaaaaacttgaatgttgatattcctcgtctgcagcaggatgttgaagacagtttgagtcaagaccaagactttggtgattcagctaattggctgggtgatgataacacgacgactggtcaaaagaagcgcaagagcactactcctaacttagataaggtagcggttaatttaaatcaacgtgtgcgtaatggcgagattgatccggtgattggccgtgaccaagaaattaagcgtgtgattcaaattttgtctcgacggactaagaataatcctgtcttagttggtgaaccaggagttggtaagactgctgttgctgaagcgattgcaactgagattgtcaacaaaaaagtgccacaggatatgcttaagaaacgggtaatggccttaaatttaggtagtttagttgctgggactaagtatcgtggtgagtttgaagacagaatgaagaaaatcctgaacgaagtcaccaaggatggcaatgtcattctctttgttgatgaaatgcatactttaattggtgctggtggtgctgaaggtgcaattgatgcttctaatatcttgaagccttcgcttgctcgtggcgatattcaaatgattggtgcaactacttttaatgaatatcaaaagtacattgaaaaagatcaagctttggcacgtcgttttcaacaagtgcgcttaagtgagccttcaagagatgacactttgacaattatgcgtggcttgaagtcgaaatatgaaaagttccatcatgtgactatttctgatgagagcttgaaggatgcagttgatttgtcaacgcgctatatttcggatcgctttttgccagataaggcgattgacttagtagatgaagctagtgccgcagttaagattcgtaataacattagcaatgatgctgagctagaaaaagttaatgagcaaattaagaaactgattacgcaaaagaatatggctgccgctagtcaaaactttgttaaagctgctcaattgcaggatgagcagaacaacttagaaatgcaacgtgaagcaatggtagagaagttagaagacaaagttagtgctaaagctgtggttgagccagaagatatcgctaaagtagtttccaactggactggcgtccctgttacccagatggaacgcaatgaatcacggcagctagctaacctggaaaagattttacaccaacgtgttattgggcaagataaggctgtttcagcagttgcccgtgctattcgtcgtagtagaagcgggattaaagatgaacgtcgtccgattggttccttcttgttcctaggtccaactggtgttggtaagacagaactagctaagtcagttgcagcagcaatgtttggctcggaagacaatttgattaggctagatatgtctgaatatatggaccaaattgcttcaagcaaattaattggctcggcaccaggctatgtcggttatgaagaaggcggtcaattatctgaaaaggttcgtcgtcatccgtactcggttattttgcttgacgaagtagaaaaagctcatccagatgtctttaacttgcttttgcaggttttagatgaaggatttttgactgactccaaaggtagaaaagtcgactttagaaatacaattataatcatgacttctaatttaggttctcgttcgctctttgataataaggcagtcggcttcaatgcagataatgcagatccagccaaggcgagatcagctaaagttgaacaagcaatcaaacaattcttccgcccagaatttttaaacagaatcgatgaaactattatcttcgatgaactagataagaagcagctgcgcaatattgtaactttgttaacgcacaagctggtagttcgtttgcaaaagaagggtatcgaattgaagctatcacgggcagcactggatcagattgcacaagatggttatgatccagaaaatggtgctcgaccattgagaagagcaattcaaaatgatattgaagacaagattgccgagatgctgattgtaggcgaagttaagtcaggcgacactttgaaaattggtagtcagcatggacatttaaaatttgaagtagttaatccgaaaaaagaaactgtaaaagtcaagtgatattggtgctataccttgacaaaatgctgaaaatatcatataatttttgctgatttaaaaagactgagattcaggattttgctgatctattgtccagcaaaatgataagggacaaaaacgacaattgttgtttttgtcttttttatgcctaaaattgcagttttttgaatttgtaacagaaatgtaatatttgctttcttagacagaaaggatgtttttccttgttaaatggacacgtagtgaactacggtaaacatcgaactagacgtagcttctcccgcattaaggaagtattgaagttacctaacttaactgatgttcaaaccgaatcatataagtggtttcttgataaaggcattaaagaagtctttgatgacattatgccgattagcgatttctcaggtaagctttcattagaatatgttggctataaattgcaaaagccaaagtatacagttgatgaagcccgtaaccatgatgcaacttatgctgcaccaatgcacgttaccttgaaattgactaaccaagaaactggtgaaattaagactcaagatgttttctttggtgatttgccattaatgaccgaatcaggttcatttattgttaacggtgctgaaagagttatcgtttcacaattggtaagatcacctggtgtatattacactggcgattatgacaagaatggtcgtcaaatctttggtactactgttattcctaaccgtggtgcttggcttgaatatgaaaccgacgcaaagaacgtttcatttgttcgtgtagaccgtactcgtaaattgcctcttactgtattgattagagcaatgggtattggctctgacagtgacattattgatatgtttggtcaaagtgatactttgcaattcactttggacaaggatgttcataagaacccagctgactcacgtgtagctgaagccttaaaggatatctatgaaagacttcgtccaggtgaaccaaagactactgattcttcacgttcacttttgtatgcccgtttctttgatccacgtcgttacgatttagcacctgtaggtcgttacaagatcaataagaagctttcacttaagaaccgtttatacggtcaaactttagctgaaactttagctgatccagatactggggaaattgttgctaagaagggtactgtagttacccacgaagtaatggataagttagctccataccttgatcgtgatgactttaagatggtaacttaccaaccttcaaaggaaggcgtattaccagatcctattacagttcaagaaattaaggtttactcaaaggtagaccctgaacgtgaagttaaattaatgtcaaatggtcatattgctgataacgttaagcatttgactccagctgatgttttagcttcaatcaattacttctttgcattgcaagatgaaattggtactactgatgatatcgaccacttgggtaaccgtcgtattcgtcgtgttggtgaacttcttcaaaaccaatttagaattggtttggcacgtatggaacgtgttgttcgtgaaagaatgtcaatccaagatccttcaacagttactccacaacaattgatcaacattcgcccaattgttgcaagtattaaggaattctttggttcatcacaactttcacagtttatggatcaacataacccattaggtgaattgactcataaacgtcgtatgtcagccttagggcctggtggtttgacccgtgaccgtgctggttatgaagttcgtgacgttcactatactcactatggtcgtttgtgtcctatcgaaactccagaaggtcctaacattgggttgatcaactcacttgcttcatatgcgattattaataagtatggttttatcgaaaccccataccgtcgtgtttcttggaaggaccacaaggttactgataagatcgactatttgactgctgacgaagaagataattacattatcgctggtgccaacactccattgaatgatgatggttcatttaaggagaagttgatcttggctcgtcaaaaggaagataacgtcgaagtttctccagataagattgactacatggacgttattcctaagcaagttgtttctgtcgcttcagcatgtattccattccttgaaaacgatgactctaaccgtgctttgatgggtgccaaccagcaacgtcaggctgcaccattaattaatccgcatggttcacttgttggtactggtatggaataccgtgctgcacacgattcaggtgctgctttaatcgctaaggctgctggtgtagttgaatacgttgatgctaatgaaatccgtattagacgtgaagatggtactttggacaaatacacacttgaaaagtaccgtcgttcaaataactctaagtcatacaaccaaactcctaatgttaaattaggtgatcaggttgacaagagtgatgtaattgctaacggtccaactatggatcatggcgaacttgctttaggtcaaaacccattgattgccttcatgacttggaacatgtacaactatgaagatgccatcatgctttctgaacgattagttaaggatgatgtttatacttcaatcagtattgaagattatgaatcagaagctcgtgacactaagttaggtccagaagaaattactagagaacttcctaatattggtgaggatgctttgaaggatcttgatgctgatggtatcgttcgtgttggtgcagaagtccacgatggcgacattttggtaggtaaggtaactcctaagggtgtaactgaattatctgctgaagaaagattacttcacgctattttcggtgaaaaagctcgtgaagttcgtgatacttcacttcgtgtaccacacggtggtggcggtattgttcaagacgttaaggtttatactcgtgaagccggcgatgaactttcaccaggtgttaacacaatggttcgtgtttacatcgctcaaaagagaaagattcaagttggggacaagatgtctggtcgtcacggtaacaagggtactgttgctgcagttgttccagaagaagacatgccatacttaccagatggtactccagtagatatttgtttaaacccaatgggtgttccatcacgtatgaacatcggacagcttcttgaattgcacttaggtgcagctgctcgtcaattgggcattcacgttgcaacaccagtatttgatggtgctgacgaaaatgacgtttgggacacagttcgtcaagcaggtgttgataaagatggtaagaccgttgtttatgatggtcgtaccggtgaaccattccacaaccgtgtatctgtaggtgttatgcactacttgaagttgacccacatggttgacgacaagatccacgcacgttcaattgggccttactcattggttactcaacaaccacttggtggtaaagcacaatttggtggtcagcgttttggtgaaatggaagtttgggcccttgaagcttatggtgctgcttacacattgcaagagattttgacttacaagtcagatgacgttgttggtcgtgtaaaggcatatgaagctattgttaagggtgaaaagattcctaagccaggtgttccagaatcattccgtgttcttgttaaggaacttcaatcattaggtttggatatccgtgttcttgatatgaaccataatgaaattgaacttcgtgatatggatgaagactcaagtgaacacttgaacatcgatactttgtcacggatggcagaagagcaagaaaagaagaagttagccgaagaaactggaaaatcagaagataaagacagtaaagaaaatgcagataagccggtagctcctgcagatgagtctgacgataaagtttctaaatagtaggaggttaaacttttgatcgacgtaaataagtttgaaagtatgcaaattggtcttgcatcacctaacaagatcagaagctggtcatatggtgaagttaaaaagccagagaccatcaactaccgtactttaaagcctgaaaaagatggcttatttgatgagagaatttttggaccaacaaaagattggtcatgtgcttgtggtaagtacaagggcgttagataccgtggtatcgtttgtgaccgttgtggtgttgaagttacttcttcaaaggtaagaagagaacgtatgggtcatattgaattggctgcacctgtaactcacatttggtactttaagggtatcccatcaagaatgggattagttttggacatttctccaagattacttgaagaagttatttactttgctgcatacattgtaattgatccaggtgatactgaccttgaacctaagcaattattaactgaagctgaataccgtgaacaaaaagctaagtacggtaaccgttttgaagctaagatgggtgctgaagctgttcgcgatttgcttaagaaagttgaccttgataaagaagttaaggatttgaagaaagaacttcaaactgccactggtcaaaaacgtacgcgtgcaattagacggttagatatcttggatgccttcaagaattcaggtaacaagcctgaatggatggtaatggatgccgttccagtaattccaccagatcttcgtccaatggttcaacttgaaggtggccgttttgcaacttcagatttgaacgatttgtacagacgtgtaatcaaccgtaacaaccgtttgaagagattgcttgatttgaacgcacctaatattattgttcaaaacgaaaagcgtatgcttcaagaagctgttgatgctttaattgataacggtcgtcgtggtcgtccagttgttggaccaggtaaccgtccattgaagtcactttcacatatgcttaagggtaagcaaggacgtttccgtcaaaacttgcttggtaagcgtgttgactactctggtcgttcagttatcgatgtttcaccaaaattgaaattctatcaatgtggtgtgccacgtccaatggctttggaattgttcaagccatttgtaatgcatgaattagttaaacgtggaattgcatcaaacatcaagaatgctaagcgtaagattgaccgtgaagatgacgatatctgggatgtacttgaagatgtgattaaggaacgtccagttcttttaaaccgtgcacctactcttcaccgtttgagtattcaagcctttgagccaatcttggtaccaggtaagtcaattagacttcacccattagcttgtgaagcctacaatgccgacttcgatggtgaccagatggctattcacgtaccactttctgatgaagctgttgctgaatcaagattgttaatgttggctgctcaccacattttggctcctaaggatggtaagccaattgttactccatcacaggatatcgttttgggtaactactggttaactcaggccgaacgtggtcgtgaaggtgaaggtatgatcttcagctcaccagcagaagctgctgtagcttacgaaaatggcgatattcactaccataccattattggtatgtctgcagatgctatgcttaaaaagccatggcctaagggacatgaacacggcatctttattaccacttatggtaagattgtcttcaatcaattgttcccagatgattacttctatatcaatgaaccaactgaagagaacttgaacaatccgttggatgctaagtacttcttaggtgaaggcgaagagattgataagaagatcgatgaagtaggcgatgatttaatcgctagtccatttaagggaagcttcttgtcagattctattgctactatttacaagtattacaaggttcaaagaacttcagaatacttggatgatttgaagaagttaggctacattagctcaactacttcaggtattactattggtatgactgacgttccagaaatccaagataaggatgaaaaggtagccaaggcacgtaaacaagttgatgttgtttctaagcaatttagacgtggtttgattactgaacaagaacgtcacgaccgagtaattagtatttggaatgcatgtaaggacaagatccaaaacgaaattgcacaaattcacgcacctcgtaatccaatttcaatcatggcagactcaggtgcccgtggtaacatttctaactttactcagttagccggtatgcgtggtttgatggccactcctaacggtggtttgttcgaaattcctgttacttcaaactttaaggaaggtttgtcagtattggaattgttcatgtctactcacggtgctcgtaagggtatgactgatactgcattgaagactgctcagtcaggttacttgactcgtcgtttggttgatgttgctcaggacgttattattcgtgatgacgattgtggtactgatcgtggtattacagttagtgccatcatggaaggtgacgaaatgatcgaaccattatttgaccgtttggttggtcgtttcactgctgagactgttaaagatcctgaaactggcgaaactattgtcggcagagatgtcatgatggatgaaaacatggcacacaagatttgtgatgcaggtgtaactcacgttaagattcgttcaattcttacctgtgatactcctcacggcgtatgtcgcaagtgttacggtatgaaccttgctactggtgaagaagttgaagttggtgaagcagttggtactgttgctgctcaatcaattggtgaaccaggtactcagcttactttgagaactttccacaacggtggtgttgccggtgctgaagatatcactcaaggtttgcctcgtgtgcaagaattgtttgaagcacgtaaccctaagggtcgtgcaaccatttctgaagttgatggtgtaattgattcaattcaagaaaacccagcagaacatactcgtgaaattactgttaagggtaagattgatactagaagctacagtgttccttatacagcttcagttgctgttagcgaaggtgactacgttcatcgtggtgacaagttaactcttggttctgttgatcctaaggaattgattcaagttactgatacattaactactgaaaagtacatcttagctgaagttcaaaaggcttatagaatgcagggtgtagacattgccgacaagcacgttgaagtgttaactcgtcaaatgctgcaaaaggttcgtgtccttgatccaggtgaaactgacatcttgccaggtgaagttatggatattggtcaatttagagaccgcaacaaggaagttattatttctggtggtattccagcaactgctcaaagcgttatcttgggtattactaaggctgctttggaaactaacagtttcttgtcagctgcttcattccaggaaaccacacgtgttcttactgatgcatctattagaggtaagaatgatccacttcttggacttaaggaaaacgttattattggtaaaattattccagctggtactggtatgcctgtataccgcagcatggaacctgaagctgacgttaagaagccagattcagtatactcaattgctgatattgaaaagcaaatgaaagaaaaggataaagctaagcaagactaagctttattgaaaataaataagcatttccaatcttttaagagcgggaatgcttatttttttgtctaaaaaattaattgggttagtactaatcctaggaaaatatatggaataaatggatagcgatggttaataggagttttttcaataagaaaaattgcaattaccaagattgaagcaaatagaaaaactaaattggcaaatgatggggtgaagtagcaagcgataattaagtaaattaataaatcgcctagccccatttttctttgcattatgctatagctaaaaattcctagcaataatgtaaaagagatccagtcgattaatgtaaaagctgcaaattggttgaataaaatcgcaacgctaatggctggaattagtaggagaagatcaaattcttgcttttgataatcagagattgcaacgactaaaagcgaaaaaagcaaaatagcggtaataatgtcctgtgtcttactaaaatcgagtaaacaaaaggcaaagccgccaattaattcaaataaaaataattcaactggaatttgttgataacaataacgacattttccttgaagaaaaagataagataataatggaatttcatccaaaattgataattcaaggtgacagttgttgcactgagaacgtgagtaaataaaatttttatcattccagtgctcgtaaactactgctgcgtgagaagccaagcaacttccaattataaagttagtaaaaataaataagtatttcaaaaaaacacctccactatttattacgcaaaaatagccgatttttctttttttattttgaaaaagtttgctttctgcttaaaaccgagtacaatagtctttgtatgttttgaacagtctattcgtgagtaaaaaagaaactcccggatgtgtgaacaaaatagtattttaggaggaaaaattaatgccaaccattaatcaattggtaagaaaaggccgtcattcaaaggtcactaagtcaaagtcacctgctttgaattacagctacaacagtatgaagaaggaatcagtattcaacccagctccacaaatgcgtggtgttgcaactcgtgttggtactatgactccaaagaagcctaactcagctttacgtaagtacgctcgtgttcgtctttcaaacttgatcgaagttactgcttacattccaggtgaaggccacaacttgcaagaacactcagttgtattaatccgtggtggtcgtgtaaaggaccttcctggtgtacgttatcacatcgttcgtggtgcccttgatactgctggtgttgatggcagaaagcaaagccgttctaagtacggtactaagaaagattaaaggaggagttaaataatgcctagaaaaggtcacgtaactaagagagacgttttagcagatccagtttacaactcaaagcttgttactaagttgatcaaccacttaatggtcgatggtaagagagctaaggcatcttcaatcctttacgatgctttcaacattgttcaagacaagactggtaaggaaccacttgatgtatttgaagaagctatgaacaacgttatgccagttttggaagttagagctcgtcgtatcggtggttcaaactaccaaatcccagttgaagtacgtcctgaaagaagaactactttaggtttaagatggcttgtttcatacgctcgtttacgtaacgaacacactatggatgaacgtttagctaacgaaattatcgatgcttcaaacaacactggttcagcagttaagaagcgtgaagatgttcaccgtatggctgaagctaaccgtgcatttgcacactaccgcttctaatttgttcgttttaatttaaggagagaataatttatggctaacaagcgtgaatttccattagcaaagacacgtaacatcggtattatggcccacatcgatgcgggtaagactactactactgaacgtatcctttactacactggtaagatccacaaaattggtgaaactcacgaaggtgattcacaaatggactggatggatgaagaaaaggaacgtggtatcaccattacttctgcagctactactgcacaatggaaagaccacagaattaacatcatcgacaccccaggacacgttgacttcactatcgaagtagaacgttcacttcgtgttcttgatggtgccgtaactgttcttgatgcccaagctggtgttgaaccacaaactgaaaacgtatggcgtcaagctgaaacttacggtgttcctcgtattgttttcgttaacaagatggataagatcggtgctgacttcgataagtcagttaagtcattgcacgaacgtttaaacgctaatgcccatgctgttcaaatgccaattggttcagctgacacttttgaaggtgttatcgacttaatcaacatggttgccgacatctacgacgaagataagcttggttctaagtgggatactgttccagttcctgacgaatacaaggaagaagctgaagcacgtcgtaacgacttaattgaagccgtagccgatgttgatgacggcatcatggaaaaattccttggcggtgaagaaatttctaacgatgaattaaaggcagctatccgtaaagctactttggacttgaagttcttcccagtttacgctggctcagccttcaagaacaagggtgttcaaatgatgcttgacggtgttattgactacttgccatcaccacttgacgttaagccttacgttgctcacaatcctaagactggtgatgaagttgaacttatggctgacgataagaagccatttgcagctcttgcatttaagattgctactgacccattcgtaggtcgtttgactttcatccgtgtttacaccggttctcttgaatcaggttcatacgtattgaacgcttcaaagaattcacgtgaacgtgtaggtcgtttgcttcaaatgcacgctaactcacgtactgaaattccagaagtattctcaggtgacatcgctggtgctatcggtttgaagaacaccactactggtgactcattaactgacccagatcacccacttattttggaaagcttgaaagttccagatccagttatccaagtatcagttgaacctaagtcaaaggctgaccgtgataagatggacgttgctttgcaaaagcttactgaagaagacccaactttccgtgctgaaactaacccagaaactggtcaaaccttgatttcaggtatgggtgaacttcaccttgacatcatggttgaacgtatgagacgtgaatttaacgttgatgctaagattggtgaaccacaagttgcttaccgtgaaaccttcaccaaggaagctaaggcacaaggtaagtttgttcgtcaatcaggtggtaaaggtcaatacggtgacgtttggattgactttactcctaacgaagaaggtaagggttacgaattcgaagatgccatcgttggtggtgttgttcctcgtgaattcattccttcagttgaccaaggtttacaagaagctatgaagaatggtgttcttgcaggttacccattgatcgacgttaaggctaagctttacgatggtagttatcacgaagtcgactcatcagaagctgccttcaaggttgctgcttcacttgctttgaagaatgctgcttcaaaggctggcgcagttatcttggaaccaattatgaaggttcaagtaactactccagaagaatacttaggtgatgttatgggttcaatcactgctcgtcgtggtaccatggaaggtatggaagacagagccggtgctaagatcatcaactcatttgttccactttcagaaatgtttggttacgcaactactttgcgttcatcaactcagggtcgtggtacatttactatggtatttgatcactactcaccaacacctaaatcaattcaagctgacatcattaagaagcgcggcggagatgctgaatagcttccgttaagaactgattaatgcagttagcttaattgaaaacaatttcatataaaaaagagttatcatttttatttcaatgtcattaagttaagacattgacaattaatattagacttttaaagcactgatttaacatttaattggttaaattggtgcttttttcgtacaacaaataaggcatagcacagattctgcttttttaagctacgcgatataaataatatacagctgatttgggcttaatatttctcttgtccttgcggcctggtctaattggaatggtataatagctgatctgaataaggatccgttcaaaatcttgcgttaaagaagaagccaaatacatgctctgaataatcaagcatgattgcttgaaattgatggcatattgatacttgcaatgcttttgcggaatataggcctgtgcatcaatttgactgattgcattaaacataatcatatgggcataaatttccatttcaataaatttatcttgtttggaatggaactgtacactgcctaaagaatacttcaatttcttgaaggaggtctcaataccccaacgcagatgataaagctctttaattctttttagcggataattttttcgatcaagattggttagcacaacttcccattcttctttgcctgatttggcatcattaattctaaatttgcaggctcgaaattttattgtgcataactcgccaaaatcccagcttagatcctgggtatttttagagcgatacttaatatattggcgataatgatgctggacatggtgaatattctcactggctttatgcgtgatgtagtaatagttagaagtagttaccaggcaggaaatctcacgatcacattcttgatcaggcaatgtcgttatttctttaactccgccttgtccagccttagttcgtattatgtaatgacagttaggcaggcgattgcagttttcaatcatattgaaactagtgtagccacgatccattgttacaatatatggaccacaattcaaagctttaagcatttgaacagccgctttgcgttcatccatttctgatttaggctgaaaaatacaatcctggtaggtattattcaatagatcatataaggcattaacgtgaatttgacaatagggtttctttttatgagaagaagcttgtacaatgttattcgatttcggattccagatttgattaaagtcagagccatcaatggcaaacaaacggtagtgatgatcaaaaagttgaatattaaatagattttgattaaaaacagtcagaatatgtttaaaacaagcaggagaaagctggcttttgcgttgaacataggcagaagtactaactactttatcgttctttttagttgcatcttcgccaaaagctctaaagagttcactgtttaaattctgaccttgcatgttaattgtagttttaaggactgtcgctgcatctaaagtgcgtttcctggtaaaagcatgaggattattaataaaatcgtgaatatgatccccagtattattgataatttgatcaagacgttctagaatattcttatgaagggctttcataattaacaccatctttctggcaataattttgaaggtttaaaatatataatatataagataggcgaaaaggctggtcttttcgcctttattttatacaaaaaaagagatcgaatccaaatgattcgatctctaaaaaagcacccttaattgtcaatgtcttaacttaatgacattgcatttttattttgataactctttttttgtaaataaatttaagaaaaaagtcgtaaacccttgatatttaaggagggacaaagtacaatagtttttgtgcttatgggacagtgtgcccttaagtgtgaaaatcgttgtaaagcgttgacgcaaaaggttgcggcacgccaggctgcattgccacagtggcgtgcggggaatttttgccgagcgagtcatcttttaaagaagacgttaaggaggtaatttaatggcaagtcaaacaattcgtattagacttaagtcttacgaacatggtattctcgatgaatcagctgctaagatcgtagctactgcaaagagaactggtgctgaaatttcaggtccagttcctcttccaacagaaagaactttattcacagttcttcgttcaccacacaagaacaaggactcacgtgaacaattcgaaatgcgcactcacaagcgtttaatcgatattttgaatccaacaccaaagactgttgattcattaatgaagcttgatcttccaagcggtgtagacatcgaaattaaactgtaatttaaatagaaagaggtgtaaacatgaccaaaggaatcttaggaagaaaagttggtatgactcaaatctttactaaagatggtgtccttgttcctgtaactgttgttgaagcaactcctaacgttgttatgcaagttaagactgttgaatcagacggttacgaagcagttcaattaggttaccaagacaagcgtgaagttttgagcaacaaaccagaaaaaggtcatgctgataaagcaaagacttcgcctaagcgcttcattcgggaaatccgcggtgttgagcttaaggactatgaagttggctcagaagttactgtggatacatttaaggaaggtgacgttgtaaacgttactggtacttcaagaggtcatggataccaaggtaacatcaagcgttggggccaatcaagaggaccagaaactcacggttcaagataccacagaattcctggttcaatgggttccatcattaaccgtgtaccaaagggcaagcgcttgccaggtcacatgggtgtgaagaaagttaccattgaaaacttagtaattgaaaaagttgttgcagacaagaacgtattgatgattaagggtaacgtcccaggtgctaagaactcattaatcgttgttaagactgcttctaaagctgtaaaggctgataaataggaaggaggactagaatggctaatttaaaagttatggatcaaaacggtaaagactctggtgaagttactttaaacgataaggtttttggtattgaaccaaatgaaagtgtcgtttttgaagcaattattagacaaagagccggcaagcgtcaaggtacctcaaaggttaagaatagatctgctgttcgcggcggtggtaagaagccttggagacaaaagggtactggtcgtgctcgtcaaggttctatcagagctccacaatggcgcggtggtggtacagtctttggcccaactccacgttcatacgcatacactatgccaagaaagcaacgtcgtttggctattaagtcagttctttcccaaaagttgattgacaatgatttaattgttttagataagttgactatgtcagctcctaagactaaggaattagtatcaatgttaaacggcttaaatgctgacggtaaagttttaattgtttcagatgataacaatgtacaactttccgcaagaaacttgactaaggttaaggttgttccagttaatggcttaaacgttgaagatgctgttaactatggcaagttgatcttagatcaagatgctgttaagaagatcgaggaggttttggcttaatggacgcacgcgatatcattttaagacctgtcattactgaaaagtccacgaacttaatggatgataagaagtacacattcgacgtgcttttaactgcaaccaagacacaagttcgcaatgctgttgaagaaatcttcgatgttaaagttaagaacgtaaacattatgaacgttcgcggcaaggacaagcgagtaggtcgttacactggtaagaccgctcgtcgtagaaaggctatcgttactttaactaacgattcaaacgacatcaagattttccaagacgataacacagaagacaacaagtaataggaggtcagtcaattggctattaagatttacaagccaaccacgaatggtcgtcgtcatatgacttcttccgactttgctgagatcactaagacaaagcctgaaaagactttacttgaatctcaatcacatactgcaggtcgtaactcatatggtcatatcactgtaagacaccgtggtggtggtcacaaacaaaaataccgtatcatcgactttaagcgtaacaaggacaacgcaaaggcagttgtaaaggctatcgaatacgatccaaacagaactgctaacattgctttgcttcactacactgatggtatcaaagcttacatcttagctcctaagggcttaaaagttggcgatgtagttgaatcaggtgattcagttgacattaagccaggtaacgctttggaattaaagaatatcccaactggtacttcaattcacaatatcgaattaatgccaggcaagggtggccaactcgtaagaagtgctggtgcttcagctcaagttttaggtgctgatggtgattacactttagtaagattacaaagtggtgaagttcgtaagattttgtcatcatgccgtgcaactatcggtactgttggtaatgaacaacactcattgattcaattaggtaaagctggtcgtaagcgttggttaggcaagcgtccacaatcacgtggttctgtaatgaaccctaacgatcacccacatggtggtggtgaaggtaaggctccagttggtcgtcctcaacctatgactccatggggtaagaaggcacgtggtattaagactagagataccaagaaggccagcgagaagttaatcattcgtcaccgtaaaggtagcaagtagtagaaggagggttaattaatgagccgtagtattaaaaaaggtccttttgctgatgcatcattgttaaagaaggttgatgcacaagcagatgcagataagaagcaagttattaagacttggtcacgtcgttcaactattttcccttcctttgtaggtttgactatagctgtttacgatggtagaaagcatgtcccagtatatgtaactgaagacatggttggtcataagttaggtgaatttgttccaacaagaactttccacggacacaaatccactgatgataaagccacaacacaagcttagaggaaggagaaacatctaaatggcagaacaaattagttcagctaaggctgaagcaagaactgttcgcatcgctccaagaaaagctcgtttagtcgttgacttaattcgtggcaagagcgttgctgaagcattagcaatcttggaatttacgcctagagctgcttccccaatcgttgaaaaagttttacgttcagctattgctaacgcagaacataactacgatcttgaaagtgcaaacctttacgtatcagaagcttacgtaaatgaaggtgcaactttgaagagattccgcccacgtgctaagggtatggcttctccaattaacaagagaaccagtcacgtagttgtagtagtttcagaaaagaacgattaagggaggtatattaatgggtcaaaagattaacccaaacggttttcgtctcggtgttatccgtgattgggaatcaaaatggtatgctgacaagggatacaaagaaactttaaatgaagaccttcaaatcagaaaatttatttcagaaaagttgaaggatgcctcagtatctactgttgaaattgaacgtgcagctaacagaattaacatttcaattcatactgctaagccaggtatggtaattggtaaaggtggttctgaagttgaagctttgagaaaacaattaaatgctttaactggtaagcaagttcacattaatattgttgaaattaagaaaccagatcttgatgctaagttagtagcagatagtattgctcgtcaacttgaagctcgtattgctttcagacgtgctatgcgtcaagctactcaaagagctatgcgtgctggtgccaagggtattaaggttcaaacttcaggtcgtttgaacggtgccgatatggcaagaagagaatggcacacagaaggtcgtgttccattacaaactttgagagctgatattgattacgcttgggtaaatgccttcactacttatggtgaaattggtgttcaagtttggatcaaccgtggcgaaatcttacctactcgtaagaataagccagcttcaaagccagcgaagggaggaaatagataatgcctttagtaccaaagcgagtaaaacaccgtcgtgaattccgtggtaagatgcgtggtgctgctaagggtggtaaatatattgcctttggtgaatatggtcttgaagccctcgaatcacattggattactaaccgtcaaatcgaagcagctcgtgttgctatgactcgttacatgaaacgtggcggtaaggtttggatcagaattttccctcaaaagtcatacactgctaaaggtgttggtgtacgtatgggttcaggtaaaggtgcaccagcaggttgggtagctgtagttaagagagaaaagattatgttcgaaattggtggtgttgatgaagcaactgctcgtgaagctttacgtcttgcttcaactaagttaccaattaagactaagtttgtaactagaagttcggaagtaggtggcgaatctaatgaaggctaaagatatcagagcattaaccactgatgaaatgttagaaaaagaaaagcaatacaaagaagaactcttcaatttgcgtttccaacaagcaacgggtcaattagaaaataccgctcgcttgagcaaagtccgcaagaatatcgccagaatcaagactattctgagcgaaaaagcgttagaaaacaattaatggaagggagctattaacttgagcgaaacaaacgaaagaaatcgtcgtcacgtataccaaggtcgtgtagtttctgataagatggacaagactatcgttgtagttgttgacacttacaagaaccaccctgtttacaacaagcgtattagatattcaaagaagtactacgcacaagacgaaaataacgaagctaaagttggcgatactgtacgtatcatggaaacccgtccattatctcgtaagaagcgcttccgtttagtaaagattgttaagaaatctgtttaatttgcggatttagtgaggggaggattacacagtgattcaaaacgaatcccgtttaaaggttgctgataactctggtgccagagaacttttagttattagagtcttaggtggttcaaagcgtaagaccggtaacattggtgacatcgtagtatgtactgttaaacaagcaacaccaggtggcgttgtcaaaaaaggcgacgttgtaaaagctgttattgttagaactaaatcaggtgcacgtcgtgaagatggttcatacatcaagttcgacgaaaatgctggcgtaattatcaacgcagacaagagcccacgtggtactcgtatctttgggccagttgcacgtgagttacgtgagaacgactttatgaagatcgtctctcttgctcctgaagtcttataattgatagtgaggtgcactgatgttcgttaaaactggtgacaaagtaaaagttattgccggaaaagataaaggtaaagaaggtactgttctttctgttaacgttaagaaaaaccgtgtagtggttaagggcgttaacaagattaagaagcaccaaaagccttcacaaagcaatgctaatggtggtgtagttgaatcagaaggttcaattcacgcatcaaacgttaaagtaattagtagtaaaaaagaagataagtagaagggaggacacacatggcaagttatttagctaaggaatacaacgaaaaggtagctcctgcattagaagaaaagtttaactacaagtcatctatgcaagtacctaagatcgacaagattgttttaaacatgggtgttggtgatgcagtttctaacgccaagaacttagatgaagcagttgaagaattaactttgatctcaggtcaaaagccattaatcactaaggccaagaaatcaatcgctaacttccgtttacgtgaaggtatgtctatcggtgctaaggtaactcttagaggcgacagaatgtacgatttcttgtacaagttaatcaatgtttctcttccacgtgttcgtgacttccgtggtgtatcaactcgttcatttgatggtcgtggtaactacactttaggtattaaagaacaattgattttcccagaaatcgattttgataaggtaaaccgcactagaggtttagatattgttatcgtaactactgccaacactgatgaagaagctcgtgaacttttgactcaatttggtatgccgtttgcaagatagtggaggacattaatggctaaaacatcacaaaaaatcagaaatcgtcgtcctgctaagttctcttcacgcgaatatacacgttgcgagagatgtggtcgtccacactccgtataccgtaaattcggattatgccgtatttgcttaaaggaattagcacacaagggtcaaatccctggtcttaaaaaggctagttggtagtatacggttaggaggatagcttaaatggtcatgacagatccaatcgcagattacttgactagaatcagaaatgccaacatggcaaaacacgattcagttgaaattcctgcatcaaacattaaaaagtctatttcagaaattttgaaacgtgaaggcttcatccgtgattacgaagttgcagatgataacaagcaaggcgttatcaaggtattcttgaaatatggtccaaatggagaacgtgttatctcaggtttgaagcgtatttctaagccaggtcttagaaactacgttggcgctgaagacttacctaaagttcttaatggcttaggcattgccatcgtttctacttctgctggtgttattaccgacaaggaagcaagacaaaagaacgttggcggcgaagtaattgcctacatttggtaatactgacagaaaggagaacaatcaatgagccgaatcggtttaaagactattgaagtccctgacagtgtcactgttaccaaggaaggcgacaatattactgttaagggcccaaagggtgaattaactagatacttcgatccaaagattaagtttgaacaaaaagatggtgaaattaacttttcacgttcaagcgaaagcgacaaagcacttcacggtactgaaagagctaacttagcttcaatgatcgaaggtgtagttgacggttataagaagactttgaagttaatcggtgttggttaccgtgcacaagcacaaggcaacaagattactttaaatgttggttattcacacccagttgtattgactgcaccagaaggtgtttctgtaaaggcaacttcagcaactgatgtagaagttgaaggtgtttcaaagcaagatgttggtcaatttgcagctgaaatccgtgccgtacgtccaccagaaccttataagggtaaaggtattcgttatgttgatgaatacgtacgtcgcaaggaaggtaagactggtaagtaataagtagttatttttgaggtgaaattgtgatttctaaaccagataaaaacaagttacgcttaaagcgtcatagacgtattcgtggaaaaatttctggtactgctgagcgcccacgcttaagcatttttcgttcaaataaaaacatctacgctcaattaattgatgacgtagcgggtgttacgcttgcaagcgcctcaactttggatgaaaatgtatcagatgcaactaaagtagaacaagctgctgctgtaggtaaggcaattgctgaagctgcaaaggcaaaaaacatttctactgttgtattcgacagaagtggttacttataccacggccgtgttcaagcattagctgatgctgctcgtgaaaacggattagatttctaggaaaggagaattaacacatggcaaaccgcaatgattctcgtaacaatcgcagaaacaaagacgatatcgaagatcaattagtcgctgtcaaccgtattactaaggttgttaaaggtggccgtcgcatgagatttgctgctcttgttgttgttggcgacaagaaaggccgtgtaggttttggtactggtaaagctcaagaagtcccagaagcaatccgtaaggctgtagaagacggtaagaagaaaatgatcaatgtacctaaagttggtactactattcctcatgaagttattggtcactacggttcaggtaacattttattgaaacctgctgaagctggttctggtgttgctgctggtggtgccgtacgtatcgttatggatatggctggtatctcagacgtaacttcaaagtcacttggttcaaacactccaattaacgttgttcgtgcaactatcgatggtttgaagaagcttagaactagtgaagaagttgcaaaacttcgtcaacctgaaagagcttaagattagggagatcatagatgactgatttaaagattactttaattagaagtgttgctcaccgtctacctcaacaaagaaagatcgttaaagctcttggtttaggtagagtggatagtactgttgttcttccagacaacgctgctactcgtggtgcattattaaagattgctcacttaatctctgttgaagagattaacaaatagaatatcaaggaggtgccaaattaatgaagcttcatgaattacattctgctgaaggctcacgtcgcaatagaaaacgtgttggtcgtggtacttcaagtggttacggtaaaacttcaggccgtggtcaaaagggtcaattagctcgtcaaggcggtcatactcgtttaggttttgaaggtggtcaaatgccattattcagaactatgcctaagcgtggttttaagaacattaaccgcaaggaatatgcaattgtaaacttagatgatttaaacaagttcgaagacggcagtgaagtaactgtagaatcacttaaagataatggcttagtaaagaaagaattgtcaggtgttaagttacttggcaagggcgaattaaaagttaagttaactgtaaaggttaataaagtttccgcatctgctaagcaagcagttgaagccgctggcggaactgttgaggtgatctaatgttttcgaccttgaagaacgccttcaaagataaagaaattagaaataagctctatttcacgctctttattcttttgctgtatcggatcagcgcaaacattaccgttcccggtgttaatgcgaaggcgatcacgcaggttgcgcaaactggtttagttccaatgctggatactgtatctggtggtggactagataactattcaatattttctttgggtgtttctccttatattacggctcagattgttatccagctgctacagatggatattgttcctacgttagtagaatggggaaaacaaggtgaagtaggtcgacgtaaaacaaatcaagtaactagatatttagcattagttgttgcttttatccagagtattggtattacgttaggctttaacgctttaactcaaatgggtttggtaaagaatcaaacaccacagacttatatagaaattgctattattatgactgctggaactatgttattaacatggttgggtgatgaaatcactgataagggtctaggtaatggtatctcagtaattatttttgctggtattattgcaagactaccaagtggtctatggcaaatttataaggaagaaattattaataatagtgctagtgatcgttggcaaggcattttgttcttcatcgcggttatagttgcaatccttatcgtaactcaatttgttacatgggttgaacaagctgatcgtcgtattccaattcaatatacgagaagagcgacgatgagtggttctgaaagttttctaccattaaaggttaatgtatctggagttattccggttatttttgccagttcatttattgttacaccggcaacgattttaatggcctttcaaagaacccagggcgatcaacaatggtttaaagtaatgaaccaaatctttagcttacaaactactcctggggtaattatctacactcttttaattatcttatttacattcttctacgctttcgtacaggtcaaccctgagaagctagcagaaaacttacaaaagcagggtgcttatattcctagtgtatggccaggaaaagatactcaggattatatttcaaagatgttgatgaaattatcaacagtaggttcattattcttgggcttagttgctttactgcctcaattggctactaacttttggaatctcccaagttccattggtttaggaggaacaagtcttttaattgtgattggggttgttctcgagttatctcgtcaaattaacggcttgttaatgaagagagaatatgttggattcatcagataggaacggataaatgattaacttaattcttttagggttaccaggtgctggtaaaggtacagcatcagagcgaatcgttgataaatatcacttaactcatatttcaactggggatatgtttagggaagcaatggctaacaagacgaaggttggtcttgaagctaagagttatatcgataagggtaatctagtacccgatgaagttaccgcaaagttggttgaggaacgtttaagtcaacctgatattaaagaaggttttatcttagatggttttccaagaaccactgtacaagcagaacttttagatggtattacaaaacgtttggagaaacctttaacaaatgtcattgcgcttgaagttgacgaagacactttgattaagcgtttatcagcaagatacatgtgtaaaaattgtggaactacttacaacaagctttccaagcagccaaaagttgagggcacttgtgatcgctgtggtggccatgaattttatcaacgtgaagatgataaaccagaagttgttaagaatcgtcttgaagttaatgaaaagatgaatgcacctttgaaggacttttatcagaagaaaggcttgctcactgtaattaatggtgaacaaactccagaaaaagtctttgaagatattgatgcggtattgagtaataatcaatagaagaaaaatttgtataattttttatccgtgttataatttcaaagtatatgactgtttaattgcggaggaacaactttggcaaaagatgatgtcattgaagtagaaggtaaggtagttgataccttacctaatgctatgtttaaagttgaattggaaaatggagccacaattttagcacacgtttctggtaaaattaggatgcactacattcgtattttgccgggagaccgtgtgactgtggaattatctccatatgatttaactaaaggtagaattacgtatcggtttataaagtaatataacggagggaaacatgaaggttagaccatctgttaaaccaatgtgtgaacattgtaaagttatcaagagacatggccgtgtgatggtaatttgctcagcaaatccaaagcacaagcaacgtcaaggttagaaatagagggggtgtagtttatggctcgtattgctggtgttgacttaccaagagataaaagaatcgttatcgctttaacttacatttacggtatcggtgaagcaactgccaagaaaatttgtgctgatgctggagtatctgaagatattcgttcaaaggatttaactccagaagatcaagaaaagcttcgtgctgaagttgacaagtaccgtgttgaaggtgacttacgtcgtgaagtaagcatgaacattaagcgtttagttgatattggttcttaccgtggtattcgtcaccgccgtggacttccagttcgtggccaaaataccaagaacaatgctcgtactcgtaagggtactaagagaaatcgttaattttatttataaggaggtttattgatgcctgcaaagaaaacagcacgtaagcgtcgtgtgaagaagcatgttgaaagcggtgtagcacacattcactcaacgtttaataatactttagtcatgattactgacgttcaaggtaatgcagttgcttggtcttcagctggtgcattgggctttaagggtagtcgtaagtctactccatttgcagctcaaatggcagctgaagcagcagctaagagtgcaatggaccaaggcatgaaacatgtagaagtttcagttaaaggtcctggtgctggtcgtgaatctgctattagatcacttcaagcaactggtcttgaaattactgcaattcgtgacgttacgccagttcctcacaatggttccagaccaccaaaacgtcgtcgtgtttaattttgtccttgatataggacgtaacgttttgaaaggggcccagtaatgattgaatttgaaaaaccaaatattaccgttgttgaacaagaagattcttacggtaagtttgttgttgaaccacttgagcgaggctttggtactactttaggtaattctttaagaagagtattacttacttctattccaggtactggacttgtttatgtgcaaattgatggcgttttacacgagttctcaacagttcctggcgtcagagaagatgtaaccaagatcatcttgaacttgaagaaacttgaattaaagtctctttcagatgaacaaaaggttattgaattggacattgaaggtccagccacagtaactgctgatgatcttaaagttgatgcagacgttcaagtcttgaatccggatcaatatatttgtaccattgctgaaggtggacacttgcatatggaacttgccgtaaagaatggtagaggttatgttgctgcaagtgacaataagagtgatgacatgccaatcggagttatcccagttgactctttattctcaccaattaagaaggttaactaccaagttgaatcaactcgtgttggtaagagagatgactttgataagctcacttttgagatttggactgacggttcaatcaagcctaatgacgcccttagttttgctgctaaaattttagttgaacactttaaggtatttgaatcagcagatgcaaatgctaaattcagcgaagtaatggtggaaaaggaagacgataagaaggaaaagaagcttgagatgactatcgaagagcttgacctttctgttcgttcatataactgcctgaagcgtgctggcattaatactcttcaagagttaactgacaagacagaatcagatatgatgcgtgtacgtaacttaggacgtaaatcattggaagaagttaaaaataaattaaccgacttaggtctttcacttcgtcaagaagactaagcttaggtgaataaaggaggcaaatccatggcataccgtaaattaggtcgcgatagtgctcacagaaaagcaatgcttagagaaatgactactcaattaatcatgaacgaacgcattgttactactgaaactcgtgctaaagaagttcgtaagactgccgaaaagatgatcactttaggtaagcgcggcgatttagcagctagaagaaaggctgctgcatttgtacgtgacgaagttgcagatgttcacgaagaaaaagatgcagttgttgttaagtcagcattgcaaaagcttttcagtgatgtagcacctcgttacaaggaccgtaatggtggttacaccagaattttgaagttagccgttcctcgtaagggtgacgctgctccaatggttattcttgaattagtttaatttagagtaacacaacttaatacgtattaagaattatccatgaaagtgagaataagcgtaaagatgatggcgcaagcttagtctagcttagatgataaaaatcatccctcttcatgggtgattttttttgctctttttttctgttacaatatgctaataagcgatttaagaaaggaagtggaaaaatgccagtagatagtgctgttgaatttaaggatgtctcatttacctatcccgatactaaaaaagcgattcttgatcagattagttttaaaataaaaagaggttcctggacatctttgataggtcacaacggtagcggtaagtccacaatttctaaattaattaatgggttacttttgcctgattctgctaataattctagaatcactgttttaggaatgacgttaaatcaaaagacagtctgggatgttagggaaaaagtcggtattgtatttcagaatccagataatcagtttgttggagctactgttggcgatgatgttgcttttgggcttgagaatagagctgttcctcgggagcaaatggtaaaaatagtcagaaaagttttagcagacgttggaatgctggattatatagatgcagagccagctaatctttctggtggacaaaagcaaagagtagcaattgcaggtattcttgccgtagaaccgaaaattattattttagatgaatcaacttcgatgcttgatcctaaggggagagagcaggtgctaaaaattattaagcatttaaagaaagagaagaatttgacagttatttcgattacacatgacattgatgaggctaatatggctgataatgtgatcgtcttaaatgatggcaagattttagctcaaggaactccaacggaaatttttagtaaaactgaaatgttgcaagaaatagggctagacattccatttgtacaaaaattaataaataaattaaatgaagtgggaatttctgtacctaaaaatataaaaacgaaagatgagttgaaacaatatctatgtcaattaaatttgaaaaagtaaattatatctattctcccggaacttcaatggagaaaaaaggattagataatgtttcatttgaattaactgaaaatagttttgttgcattggtaggtcataccggtagtggtaagtcgactttgatgcagcattttaatgcattactgaagccgagttcaggaacaattgatattgctggttatcatattactgctcaaacaggaaataagaatttgaaaaagttacgcaagcgggttagtttggtttttcagtttcctgaagcacagctttttgaaaatactgtgcttgaagacattgaatttggtcctaaaaactttggagcaaccgatgatgaagctaaaagtaaagctttgaaatggttgaagcgagtaggattggataaatcgctagcaaataagtcgccatttgagttatctggaggacaaatgcggcgtgttgcaattgctggggtaatggctgatgaaccagaaattttatgcttagatgagccagcagcggggttagatcctaagtctcgtaaggaaatgatgaaattatttgttgactatcaaaaagcaggtcatactgtaatcttggttacgcataatatggatgatgtggccgaatatgcagatgatgttttagtgatggaacatggtaaattagttagacatgatgcgcctaaggcgatttttactaataaaaactggctagaaaagcactatttgagtgaaccaacggctagtctttttgcctcagatttgacgaactttaactttaaagataaaccgttaacactggatcagcttattaatgaaattaagaaaaatttgcgagggtagtttatgagtaagataattgtaggacgttatattccgggagattctcttatttataaaatggatcctcggagtaaattattagttaccatattatttatattggctatctttttagctaataattcaataacttatgcgattgtgaccattttttgttttttggctgtgatcgctacaggattaaatgcaaaagtattttgggatggcgttaagcctttgattggtttaattttctttacgtcgcttttgcaattgttttttatgactggtggtcatatttattggcattggtggattttttcattatctagctatggtttgattaatgcaatctatatttttattcgttttacattaattattttaatttcaacagtaatgacagttactacaatgccacttgaaattgctgatgcgatggaatggctgcttaagccgcttaagttgtttaaagtgccggtggataaaattgcgttagtaatttcaattgcgcttcgttttgtaccgactttgtttgatgagacttttaaaattatgaatgcgcaaagatcacgtggagcggacttcaatgacggtggtttaattcaacgtgctaaggcaattacgcccattttggttccgttgtttattcagtctttagaaacggcaattgatttatctacagcaatggaatcacgtggttatcgtagtagtgaaggacgaactaaatatcgcgttttaagttggtcaaaatatgatttaattgcattattttattttgtactgttagtcggattactattaacttttaggacatattagaaatatgacgacaagatataaaatgacgatggcttatgatggtcatctttttcatggctttcaacttcaaccagaccagcgaactgttcaggggacaattgaagatgcgttgaagaaaatgactaaggggcagcgtgtgattgtgcaggggtcaggtagaactgatgccggtgtacatgcggttggacaggtaattcattttgattatcctggtaaaactattccagccaatcgaatgattttggcaatgaattctatgatgccaaccgatattatctttgatgattgccaaattgttgatgagaattttcatgcgcgttattcgattaaggggaaatggtatcgctatcgtgttagtttagatcattttgttaatccttttaagcgtttttatactggtcattttccgtatccattagatattgaaaaaatgcaggttgcagctcaggacttattgggtaagcacgattttaccagttttgcggccagcggtggtcaaattgaagataaagttcggaccatttattatgtaaacattactaaagacgaaaaagaaaatgaagtaatttttgattttattggttcaggctttttgtataatatggtgcggattatggtagcggcgctactggaaattggtaatgatcgtaggccaattcatgacttgcaacgagtaattgctgccaaggatcgtcaagaggtaagacaaactgctcatgcgagtggtttgtacctttatcatgttttttacgatgaaatcccacaaaaatatcgtttagaacagcatttataattgactttttatctaaaaggacgtactctagtatagtatgtttgtccacgataggccccggaaacttattgttttcaaactgcaaataaacggaggaatttaaattgcgtactacaccattagcaaaatctagtgaaatcgaacgtaagtggtacattattgatgcaactgacgtaactcttggtcgtctttctgcagctgttgccactattttgagaggtaagaacaagcctcaatacacacctaatgttgatactggtgataacgttatcgttatcaacgcatcaaagattagattgactggtaaaaaggcttcagacaagttctactaccaccactcatcatggcgtggcggcttgaaggccgtatcttacggtgaattgcttgctaataacccagttaagatggttgaaatctcagttaagggtatgcttccaaagaacactcttggtcaccatgaattcatgaagatgcatgtttatgctggcgaagaccacaagcacgaagcacaaaagcctgaaaagttagatattaacaaattaatctaggaggttatataatggcacaacaagctgcatacacaggtactggtcgccgcaaggattcagttgcgcgtgttcgtttagtaccaggtaacggtaagatcactgttaacgataaagatgttgatcaatacattccattccctaacttggttaaggacttgaagcaaccattgacattaactgaaactgaaggtcaatacgacattcacgttaatgttaacggtggtggtttctcaggtcaagctggggctatccgtcttggtatcgctcgtgcacttcttgaagttgacccagacttccgtagtccacttaagaaggccggtttcttaacccgtgacccaagaatgaaggaaagaaagaagccaggtttgaagaaagcccgtaaagcttctcaattctcaaagcgttaatatttacgttcaaaaatgttgttatatcaacgttttggagacttcagttggtcacctatggtcacaatgctatagggattccaatagatttaaagcattcgcatcttgcgagtgctttttttctggcattaattccagatagtatttttcagtagttaagattgaatcgtgtcctaatcttctgctaacataagataaaggaatattattactgaataaaaaagaagcgtgggtatctcttaaaccatgaaatgtggttgaagggatgcctatttttttgagcaattcttttaacataccagactgtttaaagctgaaccagtcaaacaaatagccagaatctttttgagagatatccttcaatagatcgtaaatattcttaggaatagtcacactgcgtctagaatgtttagtttttaatttagtatcgtcagtagtagggctaattgatcgttttacttcaacgcaataatactgaccatcgtaatgcacatcctcaggcttaatacctaaaatttcaccacgtcttaaaccagtactaatctcaagtaataccattaagttaaattcattatctgtatgttcaagtaagtaatgttttaacttagttagatcagacattgatgaagctttattgcgtttaggtaattcttttccgtgtgctttaagtaaactagcaaaatcattgtaaatgtatcccttaacataagcatagcggagagcagttctaattttcttaagtaattcagttaccgttttcttagaatgtgttttgccatatttatctaagatactttgcatttgtacgtcatcaagcttaccaagtttagcggttggaaaaagattatcaattactttaccagctttaacataattatcaaaagttgcttttctaacgtcatgtacttttactgtttgaacgaataaataataaaagtccttgaataaagtgttttgctgggctattgcttgacctttagccttttgtagttcaagagtagtactccaaactttagcttctttttcagttttaaaactcttagttaagtaatcacgttttccgagactgtaaaatagtttgtgtaaggatgaatgattccttaaatttatttctttaaacattagaaaaaggagttcctttctcgtatgattggtttgaacaaaaaaacacatacagaaagaagaactccttcatgaatgattttaccaaagattttgctcaagctctattcaatccagacaaaataaatgatttattgcgcaaagagctacaacaggctgttaataacttgctagaagctgagttgactgcctttctaggctatgatccctatgccagaaatggctggaatactggcaattctagaaatggtgcttatttccgcaaggttgatacccagtttggaccaattgaagtgcaagtgcctcgagaccgcaacggtcagtttcatcagcacacgctgcctgactacaagcagcactctgatgttttggaaagcacgattatcaagctatactccaaaggcgtaactaccagagaaatcgctgacttgattgagaaaatgtatggcagtcattatagtccagctcaagtatcaaatatttccaagcagatgctccccaagattgaggcttatcacaagcgcaagctaagcgacaagtttttctgtgtctatttggatgcaacataccttcctttgcgccgagaaacgtttgagcgtgaagcagtatatattgccattggcattaaacctaatggacataaggaagtcattgactactgcattgctcctagtgagaacattgaagtttggacagagatgcttcaaaacatgaagtccagaggcttgaagcaagttgagctttttctttctgatggtgttgttggcatgaaaacagccttggccaggacttatcctaaagctcattttcaacgctgcctggttcatgtcatgcgcaatatctgcgctaaagtacgcgtcgacgatcgtgaaaagatcatgaacgaattcaagcagatacatcaacagacaagcaaaaaagaagctgcagctgtcttgcacaaattctatgccaaatggaataaagcttatagccatgtcatcaaaggtttgaaggaaattgagcccgatctgctagtcttctacaattatcccaaacaaatcagagcttcaatttattcaaccaatatgattgaatcctttaacaacgtcatcaagcgtaaagctaagcctaaggcagaatttccaactgaacagtcgcttgatgcatttattggcatccaggcaatgagctacaatgaccgttatttcaatcgaattcataaaggctttggtcaggttcaggacaccttagaatcctactttgattaaataaataattaaaaaatcaatttacgagaaagatctatttacacaaaagatttgacagtttccgttttccatgttgatagattgttactctggctctatatgatgagccacgtttttcaatacttgccataaatttaatcgtcctttcaaaagaaaagccgattatcttaccagcaataaagttagcagataaccgactatttctcaaatctttttcaattttgtttctttaagatcgatgaaagcttcgatacttttaatggtaaagcgttctgtgtgttctcctagtttaaatcttttaaagtcaggatcagagcgaaatactttatcaaaagttttgggatcaataccaatatattttgaagcttcttcgcgagttaataatttagccactattattatcctgagattgtttagttaccaatattgagataaaatctaggtagtaggtaatctagtcattgcttttgtctctattagcatgactagtatttttttgcgattttatcttccaaattgcttcggataatttatcatcagtgattagatcatttttaactttattagtattgcttttagtaagttgcaacgggataattcgtcttttcaactgttcaaaagaatcaatgacttgattagcaatattacattcaagataaaaactaagtggatcataaggggtagtgatgtaaatggcacgcgcatttagataacgatcgtgataccttgcgggagccattttgtctatttcccaaggatccaaaagggtaagtagttgaccatagtcatagtcatttggtcgcaagtcattaattactatgaatttttgccctttgtattcttgaaagtgatcccgttgactacctgaaatacagaaatcttcaggatgttgtttttctaaaatttcccgtactaacttagtcttaccaattccggaaacaccatatatccagtagaccttacaactctgacctttgaagtcctttaaaaaccgttgatgctttttgtaagctaggatgtcttcaatatgatctaacagtgttttatgttttgccatctcaagaacaccgatttcttcttgaagttcttctttagtgattttttcatttgaataatcatcaataaagttttcaattgcttgtcgtgatggctttttgactttttgtctaatctcattgattctatctttaaaatcaaatgaagctactacttcttttggatcataatgatgtttactcttagcattagtagtttcatggatcagatagctatagccattgttaataatactgtgccatgcttcaatatattgttcatgatcattgaaaatcttagatactcttgaaatggttttagcatctttgaaatgaagcattacatgatagtgaggtcgaatcttttaacttatctttactaaatggtaaatgatctaaatcttgggtatacataaagttgtgagaacgtattatttttttcacaattaaagatttcctttctattcaacacgaactacatattaactttggggctagataacaagttcattattactttatttttgtttatcagatggaaagcaattgcaagaagcagcagatatattagccaaggctaaggtgcatctatctatggtgatattttcaccttaaatcaaactgcagcagctatggttaaagttgctcaaggaggtaataagggtaaagtattactgcaaatgaatgaagcttaagttaacatgaaataataaatacatttagataaagaaagaccctcaaagattctaaatttgaatttttgagcgtctttttagattgctaatcattttaaaggtacttgtattacatttactcctgctttaataaattcattaattacactgttttctacaaaagtatcagttattaataaatcaatatcttttattgttccaatagtaaaattagagaatttattgaacttgctatagtcggcaacaacaataaccttttgtgattgctgaataatagttttattaacttctgcttcttccataactggtgttgaaataccttggttaatgctaattcctgcgcaaccaataattgcatagttggcacgtaaagatagaaatgctttagttgccaaatcaccgctcatgattaatttatgatgtatttccccacctgttaagatcactttgcttttagtattttcaaaatttccagcataaccattgttagcaacaattattatatcctttgttaataaatgtggaattgcatcaaaggctgtactactagagttaataaatactatatctccatcgtgaatatatctggctgcctcttttcctaagctttgcttaatgtaactaacgggctgagataatgggatttcttctggtgcaacaagggatatgacaccacgcttttttgaaatcttacccatttttgacaaataatcacagtctcgtcgaatagtcatttcagaaaccttcatctttttgcttaattcagaaatagaaatttcccttgtgtgatttagtaaatcaatgatttgcttgcgacgtttttgttgattaactagctcaacgtctttaaccaaagctgttgagctgagggaggagacgctgatgttacgttactttttagaaaataatttattaaacattactgatgaacatcctgagacttgggaagaagcaattagagttgctggtaaggtaatgaagcaagacaagttagttactgatgattatattgattcagttattgctgatgttaagaaatatggtccatacattgttattgttcctggtgtggcaatgccacactcaaaggctgatagcgaaggagttttaggtactggtataggtcttacaattttgccagaaccagtttcattcgatgaatcagacccagataaaagtgcaaaattattctttatgctagcagctaaagataataatacacatgtcaaaaatattgcccatttatctgacatgttaatggaagataacatgattgatgatctttctaaggttaagaatttagacgattataaggcagtaatgaagaaacataatatgtgatatcggaagcggggagtataaatggctatattaaatattctatctaagatatgggattattttgctaccaatattttgcaacaaccagctttcatgattggttttattgtcttacttggttatatcttagagaaaaagaaatggtatgaggtcctttcaggcttcttgaaagcaacagttggatactttattttatcggctggttctgttggactgatcaatacttttagaccaattttagtcggattaaaagatcgttttcatttgaatgcgatggtaactgatccatattttggacagaatgcagttactgccggaattatgaaagagtttggtagatcttttgccgatactatgcttttgttgttatttgcatacattatcaatatcgtgttagtaagattttcaaaatatactaaattacgtgctgtttttacaactggtaacgtgcaagtacaacaagcggctaccgctttctggttgatcttgttctgttttccaaaattaggtcatttacctattttaatcgttatgagtattatcttaggtttatattgggccgttggttcaaacttaactgtagatattactcaagagttaactgatggtgctggctttgctatcgctcaccaacaaatgtttggtatctttattttcgctaaattatcagaatttttggaaaatagagccaaaaagaaaggtaagaaagaagccagacgattagaagatgtaaagttaccaggtttcatgtcaattttcaacgacaatatggtatctacatcaattttgatgttaatttttatcggtgcaattttagtagtattaggtccagattacttagttaaagctaaatttatgcaacctggccaaagttttattttctacatcttacaaacttcattacaatttgcagttttcttagcaatcttacaattaggtgttcgtacattcgttaatgaattgactgaatctttcactggtatttcagacaaatggttacctggctcagttcctggtatcgatgtcgcagctaccttaggttttggttcacctaacgcaggtacaattggtttcttgtttggtgcattaggacaattcacaatgatcattttattgttgattttccactcaccaacaattgttatcgccggatttatcccgttattctttgataacgctgctatcggtttgtattcaaataaccgtggtggtttcaaatatgcaatgatcatgccttttatttctggattgatccaaataggcgggtctgccttaattgctacctgggtaggtatggcgaaatacggtggttacatcggaatgttcgattgggctacagtttggccattcttcacagtattgatgaaattcttaggctttgttggtattgctcttgtaataatcattttggtaatgattcctcaattgcaatatcgtgccgataagaaaggttacttcatgattactgaagattatgaaggttggaagaagttacatggtaaagaatagaggttaattaaaatgaaaataatgtcagcttgtgctaatggttcgggaactagtttaatgctttctagaaccgcaagaaaagcaatggaacaattaggttatgaaattacagtttcagatcatacttctgtttcagaagctagaggaactgctagaaactatgatgtggtatttacatcattaccttttgtgaacatgtttgatgaagtaaagcaaaagggtggcgaagtaattggcgttaagaatgtaatgtcagttcctgaagtaaaagaaaagatcgaagcttcagatattccaaataagtttaagaaataatcttaggagaattaatttatggctttaccaatgttacaagttgctttggattgcgagagtactgctgaagctttaaatgtcgcaagacaagtaatggatcaagttgatgttttggagacaggaaccattctttgttatcaagatggtgtaaaggccgtatctgctttaagagcagtgggaccagataaaatagttttagcagatgttaaatgtgctgatgccgggactaagttcggtaaggcaagcaaagatgcaggtgctgattggatgacttgtattaacgctgctactgttcctaccatggttaatgctagaaaagaaattgaagttcaagttgaattatatgaaggctgggacaataaagaacgtatgcaagaatggcttaacaatggtattgatcaagttgtttaccaccaaagtagggatgcaaaatttgcaggccaaaaatggggcgaaaaagatgttgcaaacgttaaggccttgattgacatgggctttaaggtttcagtaaccggcggagttcatccggaagttttgaaattatttaaagacttaccagtgtattgttttattgccggccgtgatatcagaaatgcggaagatccacatgcgcgtgctaagcagtataaagatgaaattaagcgcatttggggttaatcattaattttactcatattaaaaaattccttaattagttttagaaagggcaatgcacgtaaaaacgtttattatgcattgctctttttgtattaaaaggcaggtataggttatgactgtaaactcattaggtatttacgaaaaagcattaccacaagatttatcttggaaagaaaaatttaatttagttaaaaaattaggcttcaattttttagaattttctgtagatgaaagtgatgcacgcttagcacgtttggattggaccaaggaacaaagaaaagaatttagagatttaatgtgggacactgacattcgaattaataatttgatgttatctggccacagaagatttcctcttggatctaaagatccagaaaccagaaagaaatctcttgaaatgtgccaaaaggcagtagatctctgtgtagatttaggaattcataatattcaaatggcaggctatgatgtttattatgaagaaaagagtgagaactctagagaattatacgttgaaaacttagctaaatgtgttcatatggctgcaaagaaaaacattatgctttcgattgaaacaatggatgatccatttattactaacattgcagatattaaacaatataaaaagcaagttagaagcccatggcttcaagcctatccggatttgggtaacctctctgcttggccacaaaatgatcctgctaaggatttagagaatggaattggtaatattgttgccatccacttaaaagatactctggcagtaacagatggttttgagggtaagtttagagatgttccatttggtgaaggctgcgttgattttgaaggactacttcgtgaattagtaagactagactataacggaagttttacgattgaaatgtggccaggtgataacggtgatgatgatcctgttgctgaagttaaagaggccaaagctttctttgacaagatctttaaaaaagttggaattgaacaagaacctgtagattagaaagtggaaaataaaatgttagaagatttgaaaaaagaagtctatgaagccaatatgcaattacctaagttaaatttagttacttttacttggggaaatgtttcagggattgatcgtgaaaaaggtctgttcgtcattaagccatcaggtgttccatatgaagaattaactcctgaggatatggtagttgttaacctaaaaggtgaagtggttgaaggtactagaaatccatcttcagatactcctacacatacctatctatataatcattttcaaaagattggtggtatcgttcatacacactcaccttgggctgtttcatttgctgcagctaagatggatattccagctttgaacaccacacatgcagatactttctatactgatgtgccagcagctgatgcattaactaaagaacaaattgaggaagattacgaaggtaatactggtgtcactattgtcaaaacctttaaagagcgtggtctcgattatgaagcaacaccaggtgctttagtttcacaacatggcccatttacttggggtgaaacaccagctaaggctgtttataatgctaaagtcttagaagttgtggcggaagaagactatcatactttgcaattaacacgtgctaattgccatttaccacaatacctacttgataaacactattatcgtaagcatggtaaaaatgcttactatggtcaaaataatgctcattcaaaagatcatgcaaagcgtgcctaaaactaaggggtaaaaaatgcttgaaaattatttttttgattttgataaaactctggctagttcaggtaaggcgtcattgattgcgacaaagcaggcatttaagttaaataatttagatgagccagatgatgatcaaattttagattttatgggtattcctgctgatgtttcattccctaaaatggctaatagagaattgtcagaaagtgatgcgaaaaaattagttgatacctaccgtaatatttatggaaagtatgaaaaagaaaatacacatttatatcctggaatgcgagatgtactagaggatttacagcaaaaaggtaaaaatttatttgttgtatccagtaaaagtcatgatattttaaagagaaatttagataatttgaaaattactcaatattttaaagactttgtgggatgcgatgaggttcagcattataagccagccccagatggtattttgatacttttagacagatacaatttgaataataaacaaagtgtaatggtaggggatgctcgttatgatttgcaaatgggcaaatcagcgtctgttaaaacttgtggagcagcttgggatgcttttagtgtggatagcttaaagaatgaacatcctgattatttgctatttcatgtggcagaattaaaaaatattgaatagagttcatatattttaaaattggatggtatcaattttgaaagtagttgaactctttagcaaaaatgatattattaacttgtaagggaaaacggttacataacggatggtctataggaggacatcatggctgtagattacgattcaaaagaatatttaaagagcgtcgatgcttattggcgtgcagcaaattacttatcagttggtcaacttttcttaatgaaggccccacttcttaaaacacctttagttgctgaagatgttaagccaaagccaattggtcactggggaactattgctccgcaaaactttatttatgctcacttaaacagagtgttaaagaagtatgatctggatatgttctatattgaaggttcaggtcatggtggtcaagtaatggtttctaactcatatctggatggttcatacactgaacgctatccagagatcacccaagatgaaaagggtatggctaaattgtttaagcgcttcagtttcccaggtggtgtggcatcacatgctgctcctgaaactcctggatcaattcatgaaggtggggaattaggttactcactttcacacggtactggtgctatcttagataatcctgacgtcattgctgctgttgaaattggtgatggtgaatcagaaactggtccacttgcagctagttggtttagtaacaagtttattaatccaattaaagatggtgcggtattaccaattttgcaaatcaatgggtttaagatttctaatccaactattgtttctcgtatgagtgacaaagaattaactgaatacttccgcggcatgggctgggatcctcattttgtttcagtctttaaaggcggtcgttttgacggtgaaaaggatccaatgcaggttcacgaagaaatggctaagactatggatgaagtcattgaagaaattaaggctattcaaaagcatgcccgtgaaaacaatgacgctactttgccacattggccaatgattatctttcaatgccctaagggctggactggtccaaagaaggatttggatggcaacccaattgaaaactcattccgggctcaccaaattccaattccagttgcacaagatgatatggaacataaggaaatgcttgaaaaatggcttaagagctacaagccagaagaattattcaatgaagatggttcacctaagaagatcgttactgaaaatacggctaagggtgaccacagaatggccatgaatccagttactaatggtggtaagaaccctaagcgtttgaacttgccagattaccgcaagtacgcattgaagtttaagccaggtcaaatggaagcacaagatatggttgaatgggctaaataccttagcgaagttgctgatcttaacccagacacattccgtggctttggtccggatgaatctaagtcaaaccgtttgtttgcacttcttgatgatcaaaagcgtcaatgggaaccagaaattcatgaacctaatgatgaaaacctagctccaagtggtcgtgtaattgattcacaattgtcagaacaccaagatgaaggattccttgaaggctatgttttgactggccgtcatggcttcttcgctacttacgaagcctttggccgtgtagttgattcaatgcttacccaacacatgaagtggttaagaaaagctaaggaacaatactggcgtcatgactatccatcacttaactttgtcgcaacctcaactgtcttccaacaagaccacaatggttacactcaccaagacccaggcatcttgactcacttatatgaaaagaatcgtccagaccttgttcatgagtacttgccatcagacactaatacgcttttggcagttggcgacaaggctttgaaagacagagaatgcatcaatgttttggtaacttctaagcagcctcgtccacaatggttctcaattgaagaagctactaaattagctgataaaggattgagttacattgactgggcttcaactgatcaaggctataagccagatattgtatttgcttcaactgaaactgaaccaactttggaaagtttagctgcaattgatatcttgcacaagcgtttcccagaccttaagattcgttacataaatgtagtagatgtgatgaaattaatgagtcctaaggataataagaatgctatctctgataaagagtttgatcgcttattcccaagtgacattccagtaatctttgcatggcatggatacaagactatgatggaatcaatctggtttgcaagaaaccatcataatatacatattcactgttacgaagaaaatggtgatattactaccccatttgacatgcgtgtcctgaaccaccttgatcgtttcgacttggctaaggatgctgttgaaagtattccatcattggcaggtaagaatccagacttcatcaatgaaatggatgacttgcttgctaaacaccaccaatacattcgtgataatggtaaagacattcctgaagtcactgagtggaagtggacaggtcttaagtaaaaaataaagtgtctgggaaaaaactaactcttagaccataataataggacgatcaaaattcttaagtgagttttaatcgtccttttttcttttaaaattaaataaaaacggtcttttggtcattttctgttccaatatttgcttatattcatcatcatgaaggctattccaacatcggtttcaactttctttttgcctcttagatgtgtttgccttcttcgctttgaagaacttcttttgctttttcttttaaatactgccagttagggttatagcgtacttgacgctggcgaccgctagctgtcttagctaattgttccagttctgacgtaagcttcaactgcctggcccttcagcttatcatgatacttttcgacagccttgcgccaaacaaaagtgtagcggttagcatcagcttcaattttagtgccatcaataaaaacagccccctcgttgatcagccaacagattggtaaagtagataaagctcttcttaaccagttcattggcatgactgctgtgtggtatactggtcgacctgttttagcagggtgtaaagcagaatagcttctggaatcgaatccacaatccagctgatagcattagccaagtgattgctgggaatggtaaaatccaaattgagtgttaaagctgtttgacctgtgatatgatttttgtacatattagtttccacctttttgttttaatgaaataagaggccacaaatgatcacattttttatggagaaatttaaaatgttaaattttagatcatatgaagacgcagatttcgaaaaattatgcaacatccacgatcaagcgcgaaagcaagaattaaaatttgccaatcttgaagctgcatttattccattcaaaatagcatcaaagaaagagcaattatttgaagactatcaagtttacgttgcaacaaaagaaaataaagttgttggttttgtcggatttaacgaagaagagcttggctggctctatgttgatcctaaagttcaaggacaaggtattggtagtaaactgattgattttacgcttgaaaattcgaccaggccattttatttagaagtgcttgagggcaatcctgcacaaaagctttatctcaaaaaaggtttcataacaattaaacatgaaagtggcaagatgccaggtaatgaatcatttagtgttgaagttgacctaatggaatataaataaaacatcccaatcaggtgtgttttttgttagacttataaaaaatgaagctagtcaataaagtattgtcttgtcattagaaagtactacatatgaagtatatttcatgaagtccgcttcatattttagggatgatgattatcaataataaaattaaggaataccgcaaaaaacatcaacttacacaacgcgagttagctgaaaaagttggtgttacagaacggacaataatttcattagaaaagggtcggtacaaaccatcgattgttttagcttataaattagtacaattttttgagacagatattgaaactttattttgcttaaatgagtatgtgaagaatgagcaagccaaaggaaggaatgcttacaattctttttgcgattctatcagtcatacagctcttagaattaatttatgatgttgcaaatagaaaaagcgtcaattatattcaagatgttatttggttaatattgggcatctgtttgacagtcggttatttctatagtactaaatatatcggtatagccaagattgaagaagatgatgaacgcgataaatttattcaaactaaaactaataatcaagcattcaatattttacagtgggtcctttttgttttaggtgcagtaacgataataattgatgttaatctcggccaaatgggattagattctcgtgcaatggttattatagttgtaggcgttgtattaatctttttatgggcattttcttggattttgcaattaatcttaatgataattaattatttttgcaattgagactacaaaaaataaagcgactggattagctctggtcgcttatttaaattttagtatggcatttctttaaaaaattagaatatcgatctttttcaccgtttaccttccaatattaaccattcaccgaaatttttaaatttaaaatattttttcgtctatactgataagcaagaaaggagaaaaagggatgaaggtaaaatttaacattgataatcaattagcgggagaaagtgctgaattttggttaaaaaagatgactaataaattcagtcaattgggtaaagaattaagtggtgaacaagacacgatttggtgcagttatgatgatgaaattattcctgtgaagtttgaaaatatttatttaattcaagtcgaacaagagcaaactttaatttatgacaaaacacagagttacaggtataaagggcaattatatcaggttaaaaatattttgccacataattttttaatagcgtcaagaagtgcaattattaattatcaaaaaattgatcatttggaagttatggatggtggcaatattgatgtcattatgaagaaccaaatgcgggtacaaatttctagaagaaaaattaaagacttgaaagagaggttagggttatgaaaagaatggaatctttcttggtaagtggaataagtggcatgggaattggattaacttggtattcaatagtaactttatttcaaacgggaacgaattggaaaaatgctcaaattccgtttacaagtttgctcttttatttgattgtctcttttgtgatgggagcatttttcaatttgacaggattgatttttgaacaaacgcaatggtcactacgaaaacaaattattgtaaacttttttgttagctatgttgccttttttgcttttgaattagtgattaatgatttggctttatcggttcatttcttcttagtaattactggagtatttgtcttgatgtacttgctcgcttatggtttgtactttttacaattattgcgagatgttaaacaaatcaatcaaaaattgaaagaaaagtaaataatcaaaaacgatcaagcctaaaaatcttgatcgttttttcgttggttagataaaaattataaactgtcttgaatattatcagctaagtagtcataaagcataccatgctttaattgcttagtatcaactcccaaagcttcagcaattgcataggcaaaggcccaagcggtagcaggaccacggcttgttaaaattttatgctctttatcagtaacggtgattttctctgaaaaatgagcacttggggcatcttttaagcattcttcttcaatgcctggataacaagtgaagtccgcatctgccaaaacaccatagcgagcaagagcacgtggagcagcacacattgcggcatcccacttgccagcttcatgacgcttaatcatcagatcacgtaatttttcattatcgcgtaagttagcagaaccagtcatgcctcctggaaaagcaaccaaatcataatctaataaactgtcatctacaactttgtcacaagtgatttcaatatgatggtcaccatctacttttttacttattaaacctaccatatcgcattcaacgttaagtctacgcaatacgtcaacaacgcttaaaccttcgacttcttcgcaaccgtctgcaaatactacagcaacttttgtcataaaatcatcctttctataactattttaattatctacttacattagatctaagtaaaatgaaagatctgctaatttgcttaaatgaagagtaggatgaggtgaaattggtattttatcttttttaggtgccagccacaatgatttaagattggcgttttctgcaccttgaatttcttcatccagattagttccaattattaaaactgtgtctggatcaatatctggattgtctttcagaatcttaaagaaaatatttttgcttggcagcttgtccgtaaaatcatcggcgaaataagcattgtcaaatgaagaaagcaattctgtaggtgcaaggcgcggttcgatttgagtgcgcttttctttagcaaacaaaatcaaatgcagcttgccactgacttcatcaataaagtcgatggcgcccttgactaacatggtttgatccttcattgcatcatcaaaaacagttcgcgttttagaaagatcttcttttaaaaatgtagataaagctaaatcgatttgatcatcgctagataaatttttaaattctttttctaagctagtgtagcgtagtcgctcagctggtccccagtctaatccataatgttttaaagtttgccgcagcgcagttttttctgctaatttttcatttaataaactgccttctggaatgaaaattaaggtttcaaatgtagccatgaataaacttcctttgtgttagttcctattagaatacgcgtggtgctagttaaatcgttctagacaataagccaaattataagctaaaattgcaatttccaaccggctttgaaagcctatcagactacgtgctcgattgttctcggcattgtaataggtcagaagcgaaaagtcgctttcaattgttctgcgaatagccatcaattgatgatcattgtgctttttagctcctgtcatatttttacgatatggtgtccaaagttcgtaacccatttgttttagctgttgatgcagttctttgcctaaatagccttcgtcgccaagaagatagtaattagatggatgggtattttctatcagttcaactgtctccctggcatcatgaactgatgcctttgttacgacataatcaagaatgtaaccgtcatcgctaacaatggcatgaactttgaaaccatagaagtaaattttcttggtggccttataaccaatgttggcataaccgcgaaaaattttagcacgatagttgcgaattggttggcaaacaggtaccggaaagctgtcaatgatcaagaaatgtccattcaggtcaacctttttattcatttcttgccgtatctgataaatcaattgcaatagctgacgtgaacgccgattaaaacgtgagtgtgataaacaattgaaacattcacagaatcttctttgtgattcaattcctgtcttagcttgccagataagtaaagccaaaatcagactgtccgtagttttaatttgatcaatatttcgccgatgagtaaactcagccggtgcatacaaacgataccagtgccgacaaattatcactaaatctttaaaactaacttgtaaatggtggctaaaacgcttaagcttaaggcagttcaatcagatcagactcttttctattattactatttacaagtcgagtctaacaagattggacttttttattaactaaaacgatttaactagcaccacgcgtattagaattataatgaactagacaattttaggaaaggaattaaaaaatgacaatctggaccgtaattttcttattattaggtggtgttgcaggtggcttattatcgtcagtggcctcaatggcatcacttgcatcatacccagttttgctagcagtaggaattccaccagtatttgctaatgtaactaatgatgcggcgctaatttggactagcatcggttcaactgtatcttctactaaggagttaaaaggacattggaagcaagtttggttctataccatttttacagttgtgggatcaattttgggttgtattttgcttctatcttttcctccaaagatttttgaaaaagcagtaccattcttcattgctttctcaggattgatgattattgtttctgggaaacatcatagtttaaataccaaggcgcaaccaacatggcttaaaataatttattttattgcacttttaattatggggatgtatacgggttactttggtgcagctggtggagtcatcgtactagtacttttaacttacattaccaatgataaatttattgttattaacgctattaaaaatgtgatttgtggttttgccaatttggtagccttaattatctttatgtttacttcgcatatttattggcttcaagcgattcctttggcgattgggatgtttattggtggttatattgggccagctattttaagacgagtaccggaaaagccagttcgaatttttattgcaagcttggccttcattcaagccggttacttcttttatacggcatacctgcaataagtttggtacaatattaagcaatgaaaagggggctaaggttgatggcaacagaagtttatttggtacgtcatggtgaaacaatgtttaaccaattggacaaagttcagggttggtgcgattctcctctaaccgtgaaggggattaacgatctaaagagaaccgctaaggccttgagtcaagttcactttgataacatgtattcatcggatttgaagagagcaattgataccgttcacttgatgaaggatgctaatgtggtctcggatattggtaaaattaaaaagctgcctgaatttcgtgaggtcttctttggaacttttgaaggcgatgatattaaccagacttgggagcaagtagcactagccgcaggaattggccatgaagatgatgtaactaagatcatcaatcaggtaggcttgcgcaaatttcgtgcagcaacaaaaaaggctgatccgcgtcatttagcggaaaatcaggatgagttagatgagcggatggtacgggcaattgacgttttgcgcgatttaactaaagatgaacaaagagttttgttagttagccatggtgactttattaaaactttgtccataaaatattggaataagagtaatggcaaaaacgatattgtttttccaaataatgggagcgttactcgtggaattttgtacgatgacggttcatttgaaattgttgattataatgtagatgctgaagagctataaaagtcctactgccgaagtagggccttttttggtacactgataacgaaaggaaaatattttatgaataaagatcatacaactaagcgttatgtcttcgtaactctactgaatgttgttattactattgctgaatttataggtggtattttttcaggttcattagcactgctttcagatgcagttcataatctgagtgatgttggtgcaattattttatcttttgtggcgcacctgattagtcgcaaaagtcgtaatcagtttaagacctttggttatgaaagagctgaaactttagccgcttttactaatggcgttatcttgatcgtgatcagtgtggttttgtttattgaagcaattcaacgtttctggaagccggaacatattcacggtggcattatgctgattgtctcgattattgggctggctgccaatattatttcaatgctagcaatgcatagcgattccaaggctaatttgaatgtacggtcaacttttattcatatgttaagtgatgccttgtccagtgtagcggttgtaattggtgcgatcttcatttacttctggaatgtaacttggcttgacccagttttgactattttagtttcaatctttgttttgcatgaagcttatgaaattacaatgaaagcagccaatgttttgatggaatctaatcctgatatcgacttgaatgaagtgaacaagattgttttatcgttccccatagttcaaaatatccatcatgtccatgtttggcgctacagcgatgactttattatgatggacgcgcatattaatgtagccccaggattaagagccgatgaattagagcagctataccaagatattggacaggagttacaaaaagagttaggtattaatcatattaccttacaagcagagtgcgagcgtggcagaaaagacaagatgatcgttccaggccacggtattaacgaagattaggtgaaagaatgtttaatgttaatatttttacagcgattattgtattgattatgggtatttatgacatgtcctatgcttttaataggcgtaagcaacctaccaataaaggcggcattagagcctttatggctttaggaattatcttcacgatcgcaggaattgttatgatcgttagagtattaatgaagtaaggaatcttagaatggctaaattagtattagttcgacatggcgaaagtgtggcaaatgctgccaatgtttatactggctggaacgatgttccgttgactaaaaaaggtgaagaacaagcagaaaaagctggtgaattgattaaaaccatttcggattttgctcccacccacattcatacttcagtcttatcccgtgcaattgtgacagcaaatatagtagccgatgtctgcaatttattatggctaccgatgactaagacctggcggctgaatgaacgccactacggtgctttaagggaccttaataaggacatttcacgtaaagtatttggtgtggaacaagttctattgtggcgacgtagttttgattcagttccacctaagcaggggtcgccaatgattgatcgccgttataagcattttgatcagcatttgatgccacgggcagaaagtttacatcaaactcaaaaaagacttatgccatattattatgatcatatcgcatctcgattgattaatggtgaagaccaactgatcgtagcccacggttcaagtttgcgtgctttgataaaaaagctagagcagattaatgatcatgacatcgtaaaactggaagttcctaatgcggaaccgattgtttatactatggatgagcacttaaagattattaacaaacaaattttacgtaaataatgttaaaaatgcaccttagtgcatttttttaatgctctaaatgaggttttacacatatctatggtaaaatctattatgatttctagtatatttagtttggagtattaggcatgcgtaaattatttttattacgaggtgcacctggctccggtaaatcttcttttattgctcgccatcacttaaatccttatgcgatcagtcgtgatcaaattaggctactattggcggatttgacagtttactatcaagaggatgcggatgttttacaccaagtcattccgcggcacgtaactgtgcgtactgagcaaatggtggatcaccttgtagaacacaagatggaatatggggaaactgttattgtggatgggacgcatatcgttccaagtgcgattgaacattttaagccttgggtagacaagtatcactatgaatgctttgtagtagatctgatgcaacatactaccttagagagtttgcttaagcgtaatcagactagaatgcattacgattgggttaagcctgaagtggttaagcaaatgtatcgttcttatgaagcacatccagaagtaccatactgggcacataaagttgtgccaaatcagatggatcatgcgttgtcacagcgtgagacaaatttagatcgttatgctcatgtgattgcggttcctgacatggtagatgaagaagattttccacatgtgcatatctcgaacttttatttttcatttaatgacaagtttacagaaaagtatggaacttatcgaaatgtagtttcaattgctaaaactgaagatgaagcagttaagcagtttaagttgccatattttgtctttaagtttcatcacaagcactttttgatttcagcttatccaattcgaaatgagatgttggatccgatcagaaaggttaagggagtttggacatattcaactggtttgtataatgtagcggattttgtgaaagaatttccggaaaataaaaagcaacatgtgcatcagttcaacttaagtaagttagatccaacccgcttattacatatttggtaaaaaagacgtagttagaacattttatctaactacgtcttttgtgtaatttacttatattttgttttacttcaatttgccggccttagctaaaacttctttagccttttcaagtgaatggtgttcttcacgataacgcttgatgtcatagccatcaacatcggttaacttgctaagtctatcatcaaggtctttgaattctttttcaagatccttaatgacgccttcttcatcttcaacgtaaacatactcattttcatcagctttggcatcaatcttagcatcgtattcgccgacttttctagcatgtttcaaaatagatttaatatccttaatcgtttcatgttgtgcagtacggtgacgacgatcaggtactgaatcttcaattctagcgaagtggctttcagcatcactaattttctttgaaattctatctaatgcttttaattgtctttttgaatagtctgtcatgcttttttcatcctacgtaaactttaccatttgaatcctctctaccgaattcgccttcgttgtaggcctaatatttttgggatacaagaaaggacacttgaagttgtaaaaaaagtgtcagaaatttctttccgacacttaactatttgattatagctattaatacttaaatgctaaggcacccattggatcccatggcaataattgaattgggttatctttgccttcatcgtaagccttcttaagatcttctggtaagaatttcttgttgataactgcttggtaaacaaatgaattaaaccaagaatcactcattacgaagtaacccttaaagccaggtttttcaccccatgagttttcgatcttccatttagttggcttaccgtcaacgatatcaacaccggtaatcaccatggcatggtccatcatgctttcaccagaatcaagcatgtcggctttagacatagtgaagtcagcatcaaataattgatcacggcggtaaaggttagtatcaagaagtccagcacggcgttcagaatccttaactacgtttgaaccgaaccaaacaacttcgccactcttcaattgtttaatgattaagtccttcatttcatcaactttaaggtttaagtggcgaacttggcgaccgccttcaacgttacctaagtattcaactgagaataccttgtggaaaggtttgtcgttagttggagcattgatagttgagatatggtttgctaaatccatgccaacgtacttgtcaaagaattcctttggggtaatgtccctgtcaatatggtaattcttgtcatcatcgcggtattcgaagttgaacttctttggtggaacacccaatgaagtagccaaaatacggaagacatcgtttagcatttcttccttgcgagcttgtacttcatcttctgacttgccatcttgaactaatttacgtaactcaagaccatctttacgaagcaaagtatttaaagtgtcgtttaatgcacttgaattagtagcattagcagtttctggataaacactcttaggaacgataccatatttttcaataataccgcaaagcatgtcccattgaccgccgtcttgttgaggagtcgcaaataagaatgaaactttacgatcgcccaagtccttatcagcagttgcgatcacattttcaaagaaccagttagacttttcaaatttatcccagaagttagtgtaattttgagataattcgaagtcctttaacttaaatttcttttgtaatgggtgacgcatagtgtttaaagcactgaacatccagcagcgaccagactgcttttgatcggcagggttacctgtatcaatttcgattgagaaggttggatctaggtcgatcttagtttgtaagttttgactagctttgtagataccgttttcttgagcagcgtgactagccacatcaaaaacagggtggttagctaagtcttgttcaaatttattaatagtatcattgttgatttcttttaccataaaaaaaatcctcctttataagtacttaaattaattttatcttattcaaaatgagtcgtctaataatcttatcgattaaatggacgatgataccaaattttgtgaaattgaggatgctgggtgaagtagtcaatgatcataggatcaagcggccaaatgggtaagttagtttcttgagctaattgccaaactttttgcatttgtttttcaagcaaatccttactattaaattgtggattaataaaaaaatggttcattatccagacattactgtctttgcgagcgattttatctaaggtaacgctagataatagtatgtcttcttcattttttatagtgaaaatttggtgcgcatcttgcttattcataaaaaattcctttttaaaaaaataatctcatttttttgcgtaataaataatagagagctatttattttgtgttgactaaaaacattgtaaaatagataactgtcaaaataaaagataaatggagctttggaatgaaaacacgtggatttgaagtagtcaaaaagtatcaagatcaggaaattaatcttcctcgcagacagaccctagctagtgcaggctatgacatcgaagcggctgaagacattactatccctagcatttggcgactaaattttgtgcgaatttttaggttgattagaaatggacaccagctgtatgagcgcgactatgagatggcggatcagattttaaagccgttgttagtgccaactggacttaaagcttatatgccagaagatgaagtgttgattttagctaatcgttcatctaatacttttaagcgtaatctagctttgccaaatgggatcggcgttatcgatgcagattattacaataatcctaacaatgagggcgaaatttttgtacaaatgattaattatggcgtacggcccttgcacatcaagaagggagaccgtattgctcaaggcatttttatcaaatacttgaagaccgacgatgatgatccaattagtcgaaaaagagttagcggctttggatcaactaatgaaaagaagggtgattaatggctagagtaaaaacacaatataagtgtcgttcttgcggctatatttcggcaagctatttaggccgctgccctaactgtggtgcttggaatcaatttgaaaaagaaactgaagaagtgcaaaagcgttctactaaggcaactgctagtcgtttgattcagaagactggattaaatgaaccggtaaagctggataagattaaagctgaaaaagaagaacgaattgtcactaaatctgaggaattaaaccgcgttttaggtggtggtattgtgccaggctcactagttttaattggtggagatcccggaattggtaagtcaaccttgatgttacaaattatgagtgacttatctgaaaaatataaggtgctttacgtttcgggagaagaatcagctaaccaaatcaaattgcgggctgaccgactgggtgtaggtcaaagtaatatgctcttatatccagagactgacatgcatgatattcgcgaacaaatcaatgatgttaagcctgactttgttgtaatcgactccattcaaactatgaatgaaccaagtcttgattcgatgactggctctgcctcacaggttcgtgaagtaacaagtgaattaatgaaaattgccaagatggatgccattacagtttttgttatcggccacgttacaaaagagggtgcgattgctgggcctaagatcttggaacatatggtggataccgttctctattttgaaggggatgaacaccattcttaccgaattttgcattctgttaaaaaccgttttggagcagcaaacgaaattggaatgtttgaaatggttaatgaaggcttaagagaggtaactaatccatcatcaatttttctggaccaaagattacctaattctactggctctgctgtggtggtatcgcttgaaggaactaggccacttttagcagaaattcaggctttggttactccgacagcttttggctatgctaaaaggaccacgtcaggtattagttttaacaaagcttcattgctgctagcggtgcttgaaaaacggggaaacttaatgttgcagaatcaagatgtctatttgactgcaactggtgggattaaattgaatgaaccagcaattgatttagcaattgccatggcagttgcatccagttataccgataaagaaatttcgccgacagattgttttgtaggcgaagtgggcttaactggtgaagttcgccgagttgataaaatcgatgcacgagtaaaagaagcggctaaagtagggtttaagcggatctttattccacggcataatatgtattctggattaaaagatcatggcattgaggtaattcccgtttcgagtattccccaagctttaaaattagtttttggctagcattaattgaattcttactatataacgagtaaactaagattgtttgaatttactattttttgaaagaggcatgaattttggctaaagaaaaaatccgtgtaagatatgcaccaagtccaactggtcacttgcacattggtaacgcacgtactgcactttttaactatttattcgctcgtcataacaagggtacgatggtcttgagaattgaagacaccgaccaaaagcgtaatgttaagggcggttctaagtctcaaatggaaaaccttcactggttaggaattgactgggatgaaggtcctgataagggtggcgactatggtccttatcgtcaatcagaaagaaaagaaatttaccaaaagtatattgatcaattgatcgatgaaggtaaagcatattactcatacaagactgaggaagaacttgaagcacaacgtgaagaacaacgtgctgcaggtgttgcacctcactatacttacgaatatgagggtatgactgctgatgaaattaagcaagctcaagatgaagcaaaggctaagggcttaaagccagttgttcgtatccacattccagaaatggaaacttattcatgggatgatattgttaagggacaccttgagtttgaatcagacactattggtggggatttcgttattcaaaagcgtgacggaatgccaacttacaactttgccgtagttatcgatgaccacttgatgaagatcactcacgtacttcgtggtgatgatcacgtttctaacacacctaagcaattagttgtttatgaggcacttggttgggaacctcctaagtttggtcatatgacattgatcattaattcagaaactggtaaaaaactttctaagcgtgacgaatcagttcttcaatttattgaacaatatcgtgatcttggttacttaccagaagctatgtttaacttcattactcttcttggttggtcaccaaagggtgaaaacgaaatctttaacaagcgtgaattcatcaagcaatttgaccctgcacgtttgtctaagtcacctgctgcttttgaccaaaagaaacttgaatggattaacaaccaatacatcaagaaggctgatcgcgacactttgcttgatttagctttgaacaacttgcaagaagcaagtcttgttgatgagcatccaacaccagaaaagatggaatgggttcgtcaattggttaacatctactcagtacaaatgtcatacactaagcaaattgtagacatggctaagattttctttgaagaagctaaggatctttcagacgaagaaatcgaagaaatcaagaatgatgatggccgtggtgtaattgaagaattcaagaagcaattagacctcatcccaagatttacttcagttcaaatcatgaacgctattcaagcaactcgtaaggctactggcatcaagggaagaaagctctttatgccaattagaattgctaccacgcgttcaatggttggacctggtattggcgaagcaatggagcttttaggtaaagaacgtgtattagaacacattgatttaaccttgaagcaaatgagtgctaataatctttaattagataaattgaaaaagaggctgcaaataaatgcagcttcttttttcatctgctaaaataaaaattagttattttgacagaagggacaagtgttagccgtgagagtttataatacactgacgcgtaaaaaagaagaatttaagccattagttccaggacatatcagcatgtatgtctgtggaccaacggtgtataactatattcacattggtaatgccagaagcgcaattgcttttgacaccattagacgctattttgaatataagggttatgacgttaagtatgtttctaactttactgatgttgatgacaagatgatcaacgaagcgagagctgaaaaaacgactgtacccaaattggctgaaaattttatcaatgcttttttggctgatacgacagcgctaaacattgagccggcgactttgcatccccgtgcaactcatgaaattaatgacattatcacttttgttaaaagcctaattgacaatggctatgcttatgaagtagacggcgatgtttattatcgtgccaaaaagtttaagcattacggtcagttaagtgatcaaaatattgaacagcttgaagagggtgcttcagagcacattaacgatacagaacaaagccgcaaagaagatccaatcgattttgctttgtggaaggcgcaaaaggaacccgatgaaattgcttgggattcaccatggggcaagggacggccaggctggcatattgaatgttctgtcatgagtaccaaatatttaggcgatacgatcgatattcatggtggtggtcaagaccttgaatttccgcaccatgagaatgaaattgcacaaagtgaagctaagaccgggaaaaagtttgttaattattggctgcataacggttttgtaactgtcggtaaagatcaggaaaagatgtctaaatcactgcacaatttcgtaacagtgcacgatattttaagggaagttgatccgcaagtactgcgcttcttcatggctagcgtacaatatcgccgccaaattaactattctgctgaaaatttagcacaagcagctacaattttagatcgctttaaaaatactttgactaatattaattaccgtctagaagatgatacagctagtgaagaatcagccgaattagcacaggcgattatggcaactaacgaaaaatttgaacaggcgatggacgatgactttaatgtccaaaatgctttaacagctatctatgatttgttgcctgtagttaatgccaacgctaatgctgctagagctgacaagcaagaattgcaaaagtttaaagagaaattagctagttggttattagtgtttggcgtggatactaataagctttgcgttaaaaatgctggctccaatgacgatgaaattgacgctttagttaaaaagcgtgatgaggctcgagcaaataaagattgggcaactagtgatcaaattcgtgatcaattaaaggaaatggggatcactattcaagataccccacaaggaactaggtggactcgtgactaaaataaaaaaactaacggaagaggatgttaatccggatactttaaatggacaaactttagcctatttaggggatgcagtgtatgaattaattattcgcagacacctagttaaaggcggtatcgttaaaccacaagtattgcagcgtgaagcgactcactatgtttcagctaaagcacaagctgcgttggtaactaagatgcaagatgaagaaatgttaacggatgatgaattagctgcttttcgtcgtggacgtaatgctaaaagtcatactaaggctaagaatactagtttgaaaacataccaattatcaacaggctttgaagcaatgattggttatcttgatttactggggaaaaatgatcgagtggcagacttaagcaagtggtgtattgatactgtagaagaggacgggctgaaaaattatgacttcaaataaagattttgtctttggacgccatgctggacttgattatttaaaaacacaaagtgccgacaagattaataaggtttttttacaacacggtgtacaagaagaatttgctaatcaagtttatagtttagctaaaaaaaagcgtttagttgttcaagacgtgcctaaaaataagcttgatcgtttggttgctggtggcaatcatcaaggtctagttttagcaatttctagctttgaatatgcagatttaaatcaattgctggacaagtatgatgcggaaggtaaagaaccatttttattaatgttggattctattgaagaccctcacaatctgggatcaattttgcgttcagccgatgctactggcgttgacgggatcattattcctaagcgtcacgcgactggcttaacttcggtagtagctaaaacatctacaggagcaattgattatgtgccagtagcgcgcgttaataatttagttcaaactactaaagaactgaagaaacgcggttactgggtctttggaactgatatggcaggtactgattatcgtgaatggaatgcccaaggcaagactgtactcgtaattggtaacgaaggtaaaggcatcgccccattacttaaaaagcagatggatcaaactattactttgccaatggttggtcacgtacaatccttaaatgctagtgtggcaaccggggtattgctttatcaagcttataacagtagaaatccattagtaaaataaacagaaagtagacaaaagtgtgagttttgtctacttttttagatacataaagctcatttctgtccattaaacatgtgttttcttctcaaactcaggggatagtctgtattctttgaggtggaggataaattgaatgattaatgaagagaagctgattaagaaagtacgggcaggagatgaccaagctttagaaaaattgtttcatttatatgagccgttagtaaattcaatcgtgaagcaattctatttgcatcattatgatcgtaaagactgggatcaagaggcaatgattgtttgttatgaagcagcactagttttctcgcctaaaaaggggaaatttagcagtttatataaaactaaattgtttaatcatgcacggaccttggtacgttacaatatggcacgtcgcaggcaaatctatagtcaatcgattccgctagaaaaggcggacattcaaggaagcgtgaatgaaccatgccgctctgaattatcgattccagttgatgagacttacaataattttgttaatagcttgtcacacgttgaattaattgcattattaaccataattggcgagataagtacagagtatgcgattgatcatctaaatattgaagcaatgaagctggtcagagctcgagcacgaactttacagaaaatgcggaaagtgctctaagtgtataattttttacggtaagttgaataaataattaaaaaagcccaagtcctttgaatttggacttgagctcaaacaaaaagaccagtagtctgatgttaagaacaaaaaacacattagaagctggtcttttatgaattcaattgtaactgaaatcgcaaatattataaagtctgaagataattatattaagcgtgaaagaaaaataatctgtttcttcttaaacctgattaaggaaatcatggccttggctttagctaaagttgatgatgaaatgattaccaaggttaaagcacagggctatcagattgataagaagaatgagcgctcaatcaatatggcttttggcgaagttaggtatgtcagaagaagatatgtctgcccaggcaaacaagcaaggtatcccttggatgaattaatgggctttgacaaatacaagcgctacagtattttagcagtcaaaaacatcttagaagtaagcagcgttgccacttatcgcaatactgctctagcagtcaattgcctgtctggctttaatattagccatatgcaggtgggcaatttggtaaaaatggccgggaaaaatattaaagcgggccaagaagcagattcaagatatgatgccgcaggcactaagaaaaaggtcccagttttgtatcttgaaggcgatggcgtggtgatcaaaggcactaaaagccggttggaatttcatcgctatcaggtctgtgaaggcattgtcaatataagcaagaaacgcagaaagcgaatcaatgccaaggaatttgtttctttaagccgacttgatgcgctgaacgaagccaaggagtacctggccaatacttatgatctttctgatactgtaattcttagcaacgccgatggcggtgctggatatgccaaaacagacttcgatgacattgtagggctatgcaagcgtcatgagcatttcttggatgtctttcacctaaataagaaaatcaaagaaaggctatattttgcgcctgacctgcaaggcaagctgatttctgctttggaatacaaatacagctatgacaaagttaaaactatcctaaccactgcagaaagccgactaattgatgaattgaataccgagctcaatcatgattatctggggcgcctaaggaattatattgatcgtcattgggacgatattaagccgtttaagaaacgaaaactgactgtgactaaagccattggctgctgcgagagcaaccaccgcaagtatacctaccgtgttaaggggcaaggcaagaaatggtcaaaatctggagcagaaggcatgcttaggatcttaagctgcatcaagaatcgagagctggaattttggcttagcagcgagtttgaagattcagaaataactgtattgactgaacaggaattaaaagcagcggcccgtgacagcttaaagaagcgtcatgaagttcatttaggcatccagcatggcgcattaaccgcacaggtagctggcaatagttatttaagcaagctaagcagaaatttaagtcatataaatatttaagaaattaaggttagactaatggtttaaaggctaccgcaaaaacattgacacttacgaaagtgcttttttgatagctgatcaaaagaaagtgcggtataataagtaatgtagaatattttaggaggtaatttaagatggcagacgaaattattaagactgcattgttagaccgtcacatgaaggaagcttttgactggagtgattcagatatgccagttagagatgccctttgggactactttatggaaaagaatggtagagataccatgaagacggaagaagatatgcttccatttttgaaagactcagacgataaaatcgaagccttcgttaacgaaaatcttaagaagtaaatccgactaaaaaacaatgttctacgcaccgtggtcacgcatagttttgaccactaagacagctaccttctccggtggctgtttttttatactaaaattaagaaagaattttaaagatgaaatatataattggcatagacataggaactactgcgactaaaggtgtgttgtatggcgaagatggaagtgaagtagctaaattggcaatttcctatccattgattcaggaagaagcgggacaggctgaagaagatccacagcttatttttgacgcggtacagaaaatgatttatcaattaagtcagaaagcatctggtcaaattttggcaatttcttggtctagtcagatgcacagcttaattggcttaggtgaaaataatgagttactgacaaacagcattacttgggcagataatcgtagtagtgatgtagtgcagcgggcaaaaaagtcgggctgggcaagaatgatttatcagcaaacggggatgccgccacatccgatggcgccagtgtataaattgctgtggcttaaagaagaacagccaacactttttgcacaagtaaaaaaatggattagtatcaaagaatatattatttggggcttaactggaaaaatattaactgatacaactatggctgctggcagtggaataatgaatttaaaaacgctgacctgggatgaaaagatattggctcagattgggctagatcaagttcaattgccgacaattgctgatcaacaatctactgtgggtaaaattattccagaatatcgtgctaaattgggtttaaatgatgaaactcaaatcgttttgggcgcaagcgatgggtatttgtcaacgattggtgtcggcgttttggatgagaaagattttgcattgaatgttggcacttctggtgcggttagagtaattgcaccgaaggcaattgttgatcaaaagaatcgctttttctgttaccctgttgacgccaaacattatttgcttggcggccctgtaaataatggtggaattgtgttcgattgggccagaaaaacaatttttggcccagatgaaacggcagaggacgtcttaaatgtggcacaaactgctccggctggaagtaatggattgttgtttcatccttatcttggtggtgaacgagctccaatttggaatgctcaagcacgtggatcttttgttggcttgacgcgaaatcacactaaaccgcagatggctagaagtgttttggagggaattgtttttaacttgcttggcgcctctcaaggattgcttgatcaagtgggacagcctcaagctttacgtgttactggtggctttgtgcaaagtgattttgttagacaattaatcgcggacatttttaacttaccagtgattgtaattaaaaatgagcagtgtggtaccctagcagctatgtttttagctaaaactgcattagaagataagccagacctggaaaagattaaaaagcgtactgccgaaagccaagtttattttccaaatccccaaaatgtagcgatttatcaagaattgattctcgtttatcgaaaaattgagcatgaacttgaagcctcttatgaagatttggctcagtttcaagataagcatccacagaaatttgagtaaaacaaaaaagacgcattgcgtctttttttcatagattgattaactattaagcattttcaatatcttcaacaatctgatcaactgtcatacgattgtctttcaaaatttctttcaaaggtacttgatcagtatagacacgtttttggccgtagttgagtactttaatatccttgtcgccaaggtaggaagctactttttcaccaaaaccgccgtccaaaatattgtcttcaatagtaacaataactttgttttcttgagtcaatttgtctaaagcggcagtgtctaaaatattagcagaaactggatttactaagctagcacctgtcttttcagccacctttttacctagcatatcgtacatatcacctaacgctaaaacagcaacatctttacctggtttaatgtcgtacttgatttctgaatagtcaacagcagtaatttctttaccttcaggaacatctttggtaggcatcttaattgctacaggatgcttcttttgcttaatagcccattccatcattgccttttcttcggctaagttagttggagcaaggtagatccagttaggcaagttagaaatcattacttgatcaaacacacctaggtgagtcttacttgtgccagaaatgccaccaccagcaaccatcattacaactggtaaatcattagcggcaacatcgtgtgataattgatcaaatgcacgttgcaagaaggttgaattttcaaataaaactggagttgcaccttccttagccattccggcagcgaaggcaacggattcttgttcagcaattcctacatcatggtagttttcaggatatttgtttttaattctgtctaagccgaaaacgccgggaattgcggcattgatagccatgatcttctcaccattattgatgtgatcttcaagaacatcgagtgcaatagagctagcggtcggaccttcaggcattgctactgtcgtcttgtcagtctttaaatcgaatggcattacccagtggtgtgcttcttcgttgtcgattgcaggttgataacctttgcccttgagagtgttgatatgaagcaaaatagggtgatcaacatttttaactgctttaaaagcatcgatcattgattggatatcattaccatctgcgacataacggtaatcaaagcctattgcagtaaatggattttctttggtttcaccattagaatcacgtagtttctttaaagcagtaactaagccaccgacgttatcatcaattgacatttgattgtcgtttaccactacaactaagttatgcttttcaattgcagcgttgtttagcccttcataagcaaggccaccggtcattgaaccatcaccaattaaggccatgatgttttcatgtttgcccattaaatcgcgtgctttagccatcccagttgctaaggcaattgaggtagatgtgtgaccgacggcgtaatagtcatatgggctttcatcagggttgctatatggagttacatcttcatagtggtctggatcaagccaagcgagtgcacgtccagttaacattttgtgcgggtaagtttggtgggaaacatcccagacaatcttgtcctttggtgcatcaaaaacatagtgataagcaattgtagcttcaacgattcctaagtcgggacctaggtgaccaccttcagcggcatctttttctaagattagagtcctaatttcactggctaacttttccatttctggaagagataatttttttaaatcagcaggaccagaaattttattcaatagatattcaggatgtttatttattattatgtcctttctaacaagtagttacacttattatagataagcaaaaatcaaaataaaaatatttagttgtaattgagctcgattacttttagtaatgtaaatcagattattgacgtaggaagtgacaacagtataaaatactgagtaagtatgtgtttttataaaagtttggaagtgagattatggcagtgaaaaaagcagccttagcctgcagtgtttgtgggtcacgcaactactcaatcaccgcaagtaagaatcgcactcagcgacttgaacttcaaaagttttgcaaacattgcggtaagaaaacattgcataaggaaacgaggtaaataaagctaatgattaagttttttaagagtgttggtcatgaaatgaaattggttaaatggccatccgcaaagcaaaatagacgtgatacagcaactgttattactagttcaattttatttgcggcatatttaggtgcacttgactggctcttcacttggttgactcaaagattaatgtaattgctactaagtgtataattttttacggtaagttgaataaataattaaaaaagcccaagtcctttgaatttggacttgagctcaaacaaaaagaccagtagtctgatgttaagaacaaaaaacacattagaagctggtcttttatgaattcaattgtaactgaaatcgcaaatattataaagtctgaagataattatattaagcgtgaaagaaaaataatctgtttcttcttaaacctgattaaggaaatcatggccttggctttagctaaagttgatgatgaaatgattaccaaggttaaagcacagggctatcagattgataagaagaatgagcgctcaatcaatatggcttttggcgaagttaggtatgtcagaagaagatatgtctgcccaggcaaacaagcaaggtatcccttggatgaattaatgggctttgacaaatacaagcgctacagtattttagcagtcaaaaacatcttagaagtaagcagcgttgccacttatcgcaatactgctctagcagtcaattgcctgtctggctttaatattagccatatgcaggtgggcaatttggtaaaaatggccgggaaaaatattaaagcgggccaagaagcagattcaagatatgatgccgcaggcactaagaaaaaggtcccagttttgtatcttgaaggcgatggcgtggtgatcaaaggcactaaaagccggttggaatttcatcgctatcaggtctgtgaaggcattgtcaatataagcaagaaacgcagaaagcgaatcaatgccaaggaatttgtttctttaagccgacttgatgcgctgaacgaagccaaggagtacctggccaatacttatgatctttctgatactgtaattcttagcaacgccgatggcggtgctggatatgccaaaacagacttcgatgacattgtagggctatgcaagcgtcatgagcatttcttggatgtctttcacctaaataagaaaatcaaagaaaggctatattttgcgcctgacctgcaaggcaagctgatttctgctttggaatacaaatacagctatgacaaagttaaaactatcctaaccactgcagaaagccgactaattgatgaattgaataccgagctcaatcatgattatctggggcgcctaaggaattatattgatcgtcattgggacgatattaagccgtttaagaaacgaaaactgactgtgactaaagccattggctgctgcgagagcaaccaccgcaagtatacctaccgtgttaaggggcaaggcaagaaatggtcaaaatctggagcagaaggcatgcttaggatcttaagctgcatcaagaatcgagagctggaattttggcttagcagcgagtttgaagattcagaaataactgtattgactgaacaggaattaaaagcagcggcccgtgacagcttaaagaagcgtcatgaagttcatttaggcatccagcatggcgcattaaccgcacaggtagctggcaatagttatttaagcaagctaagcagaaatttaagtcatataaatatttaagaaattaaggttagactaatggtttaaaggctaccgcaaaaacattgacacttactaattgctagcataattagaaattatcagcgattcatgctataatattgacagctaaaagaaaacctctgtgggaggtttttttgtttacctaaaatttaaggagaaaaatatggtcgaaacaacacaaaagaaatggtacgttttgcatacttattcaggctatgaagacaaggttaagtcagacttgttgtcacgtgcacaaagcatggggatgcaagactacattttccgtgtaatggttccagaagaagaaaaagtagaaaccgttcgcggcaagaaacaagaaattgaagaaaagattttcccaggatatgttttagttgaaatggtaatgactgatgaaagttggttcatcgttagaaacacacctaatgtaactgggttcgttggctcacacggtggtggctctaagccatcaccacttcttgatgaagaagtaacgcgtttgcttaagaatcaaggtcaacctgctaagaaaccagtagttaactttgatattggcgaatcagtaactattactgaaggtgcatttaatggcatggtaggtaagattactgatattcaaccagataagtacaaattatacgtatcagttgacatgtttggtcgtgcgactactgctgaacttgattatgatcaagttaagaagcttgacgaaaacgaataatatttagaatttttagttgtaattgtacccaaacgatgttattctaatacggtacgtttattattgtgggaggagaaaaaaggaaaattctccattttaaccgcatcacggaatcaaggaggttttgaccgtggcaaagaaagttattaacgtagttaagttacaaatcccagctggcgctgctaccccagcacctccagttggtcctgcattgggtcaagctggtattaacattgttggttttactaaggacttcaatgctagaaccgctgaccaaaagggcatgattatccctgtagttattactgtatatgaagatcgttcattcgaattcattactaagactccaccagcaccagttcttttaaagcaagctgctaagatccaaaaggcttctggtgaacctaataccaagaaggttggtaaggtaaccaaggaccaagttaaggaaattgccgagactaagatgaaagaccttaacgctgctgatattgaagctgctatgcgcatggttgaaggtaccgctagaagtatgggtatcgaagtcgaagactaatcctgttatttaggtaacaaattaggtgggagagttaagagaagctcgtttgaccacatatacaaggaggaaatcacatgccaaagcatggtaagaaatatttagatgctgccaagaaggtagactcaaataaattatactcagtagcagaagctatgaaacttgttaaggaaacttcatacgcaaactttgatgctactgttgatgtagcttacaacttaagcgtagatcctaagcaagctgaccaacaaattcgtggttctatcgttttaccaaatggtaccggtaagacccaaaccgttgtagtatttgctgaaggcccacaagctgatcaagctaaggctgcaggtgctgactttgttggctcagatgacttggtagaaaagatccaaggcggctggttagactttgacgttgtagtagctactccaatgatgatggctaaggtaggtcgtttaggtcgtattcttggacctaagggcttaatgcctaaccctaagactggtactgttaccatggatatcgaaaaggctgttaagaatgttaaggctggtcaagttgaataccgtgttgaccgccaagcagctattcacactcctattggtaaggtatcattcactgaagaccaattagttgaaaactttgacgcattacgcgacgttatcttacgtgctcgtccagcttcagctaagggtcaatacattaagagtgttgctgtttcagcaacctttggcccagggatcaagcttgatccattaaacttggactaatttaaaatagactattaaaagcctcgctattgcgaggcttttttctattcattgacctattattttcgaacatggtatcataaattgaacttacaaatctatatattaaggataatgtcatgaaaaagcattctattggaaaactagtcattatgttggtgctaatgctagcttttgttacgggctgtgctaataatggttctaaaatcactattgttggttcaagtgcaatgcagcttttagcagaacaagcaggtaatgattatcgcttaagtcatcaagacagcaacattgtcgtgcagggtggaggatcaggtacaggattgagccaggttcaagctggtgcagtccagattggaacctctgatgtttttgccgaaacacaaaagggaattgatgccaagaaacttcgtgattataaaattgcagtagttggtattgttccaattgttaataagggtgtaggtgtgaaaaatgtttcgcaaaagcaattgaaacagatcttcactggtaaattaacgaattggaagcaactaggtggcaaaaatgaagccataactgtgatcaatcgttctaagggaagtggtactagatctgctttcgaagatataattttacaaggaacaaaaccagttaagtcgcaagaacaggactctaacggtgccgttaaaaagattgttaattcaacgcctggtacgattagttacttgtcctttccttatgctcatgataccaatattcaaaagttgagtattaatggggtaaagccaactaacaaaaatattactactaataagtggaatatttggtgttatgagcacatgtacactaagggtaagcccaacaaacaaactaaagcgtttattaattatatgttaggtgaaaaagtacaaaaagatcttgtacctaagattgggtacctcagtatcaatgaaatgaaagtaactcgtaatagcaagaatcaagttacacaaataggaaaatagttcatggataagaaggataaattaaaggaagttgttgatcaagcaattgctagtcaacacgttccacacgttaaattaaaaaagatgggtccgactagtgttgatattgataaattaaccaagccatctaaagagactcatcaagaatattggggcaagggtttaacttacttggcaattgttttgattattgtcttagttgtctcaattatcggctttgtcggctatcacggcttggctacttttgtcagcgatcatgttaatgtcattcactttttgacttcaactgattgggacccgggtgagggcaagaatcatgttggtgctgcggtaatgatcgttacttcgttcttagtaactcttttagcagcattggtagccaccccgtttgcaattgcaatagctctttatatgactgaatattcatctaaaaagggtgccaatttcttacagtcagtgactgaattattagttggaattccgtctgtagtttatggtttcttgggattaactatcatcgtgcctgtgattagaaaactatttggtggaacaggttttggtattttagcagctacgttggtgttgttcgttatggttttaccaacaatcacatcattaacggttgatagcttaaaggctgtaccaagtcattttagaaaagcttcaatggccttaggttctacgcattggcagactatttatcatgttgttttgcgagttgctacgcctagaattttgacggcggtaatcttcggaatggcaagggccttcggtgaagctttagccgtacaaatggttatcggtaatgccgtcttgatgccatacaatttggtcagtccatcagcaacattaactagccaattaactagtcaaatgggaaatacggtcatgggaactttgccaaacaatgcattatggtcattagcattattgcttttaattatgtctttggtatttaatttcctagttaagttaattggaaagaagggacaaaagtaatatggatgcaaaaaagaaagataaattagctacggcgattatctatattttggtaggaattgttgtattaattttggccggtatcctaggtgatatcttgattacaggtattccacatttgtcctggcgctttttgagttctgaagcctcatcataccaagctggtggtggggtacgtgatcaacttttcaattcaatttatttgttaattttgactactattatctccttaccaattgctttaggagcagcaatttatctagcagaatatgctaaagataattgggtgaccaatttgattagaactacaattcaaattcttagttcattaccatcaattgtagttggcttattgggttatttattgtttgtagttcaatttggctttggtttttcaattatttctggtgctttagctttgaccttttttaatttgccaattttaactagcaatattgaagaagcaatcaagggcgtcccacaagatcaacgtgaagcaggattggctttaggattatctaattggaaaactattcgcgggattgttttacccgctgctcttcccggaattttaactggaattattttgagtgcgggccgaatcttcggggaagctgccgctttgatctatacagcgggacaaagtggatcaacagtcaattatgcggactggaatccatttagtccaactagtccacttaatgtaatgcggccagccgaaacattggcggtccacatttggaaagtaaatactgaaggaattattcctgatgccacgattgtttcagcagctacttcagcgctcttggttattgtggtaatcgtatttaatttaggtgcacgttatttaggcaataaattgtaccgcaagttaactgcagctaagtaggtgaaataatgcaagatttaaaacctagctatattaaaacttttgcaaatgatgatttggaattatcaactgaagatttaagtgttctttatggcggtaaggtacaaaaattatttgatgccagtcttcaatttaaaaagaacacgattacagctttgatcggtgcttcgggttcaggtaaatcaacatttttacgttcattaaatcgaatgaatgatcgagtagcaactgttaacggaaaaatctggtttcatggtttagatgtgaataagcctaatatcaatgtttatgaattaagaaaaaacattggcatggtttttcagcggcctaatccatttcctaaatcaattagagaaaatattgtttatgctttgaaggcagatggacataaggatcgggcagaacttgatcgagttgtagaagaaagtttgcgtgcggctgctttatgggatgaagttaaagataagctggataaaagtgcattagcattgtcgggtggtcaacaacagcgtttatgcattgctcgtgctttagctgttaagccagaaattttactactggacgaacctgccagcgctttggatcctgtttctacttctaaactggaagatacccttaagcagttgaggagtaagtatactatgattatggtaactcacaacatgcagcaagcctcaagaattagtgattatactgcattcttccatttaggacatgcaattgaatataattcaacggcagagatctttactaatcctaagggtaagattactgaaaactatattcagggaagttttggataaaatgacaacaataatttcagcaaaagatgtacatctaagttatggcaattatgaagcactgcacgggatcagtcttgattttaagaaaaaagaattaacagctttgatcggtccaagtggttgtggtaaatctacttttttacgctgtcttaatcgaatgaacgatgacatcgaaaacattaatatcacaggtgaaatcaagtttgaaggccaagatatctataattctaaaatggatttggtcagtctacgtaaagaagtcggcatggtttttcaacagccaaccccattcccgttttccgtatatgacaatgtggcttatggcttaaaaattgctggtgttaaagacaaagagctaattgatcagcgggtagaagagagtcttaagcaagctgctatttggaaagaaacaaaggacaatttaactagaaacgctcaagcattttcaggaggacagcagcaaagaatttgtattgctcgtgcgttggctgttagacctaaagttgttttattagatgagcccacaagtgcgcttgacccaatttcaagtagtgagattgaagagacactgatggaactaaagcatcagtatacttttattatggtgactcacaatttgcagcaagcaggacgaatttctgatcagaccgcctttttgatgaatggcgatttgattgaagctggtccaactgaagaaatgtttattgcacctaagaaacaaatcacaagtgattatcttaacggtcgttttggttaaaattttgaggtaaaaagatgcacgaaatatttttggatgaactgaaaaaattaaatacacaatttatggaaatgggtgtcctcgtcaacgatgatattgaccatgctacccgtgcttttgttgatcatgataaaaagactgcgcagtcaatggttgatgatgaagaaaagattcctacagaatcaattaatattcaaaagcaagccttaaaattaatggccttgcagcaaccggtagctactgattttagagttgttatcagtattttaaaggccactactgacttggagcgaattggtgaaaatgctatgagtattgctctggaaacaatcagagtaaaaggtaatcctcgtattccagaagttgaagaaattatttctaatatgacacataatgtgcgacatatgttaattcaagttttaactgcttacgtgcaagatgatgaaaaaatggcacgtgaagtggctagtcgtgatagcatgattgaccacgactatgtaagagctcgtcaattgatcgttgatggaattgaagatgatccttcgcgtgcaatggcttcatcaagctattttgtagttacccgtttacttgaacgaatcggtgaccacattgttaacttggctagctgggtggtttataaaactacgggtgaactagaagaactatctaattcaactgaaagtgaaacgatttaaataaagtaccgtaaaaagcggtgctttttttgtaataaaaaacagttgatacgcgtggtgctagttaaatcgttctagacaatatgccatattataagctaaaatagctatttctagccgctgttgaaagcctactggacttcttgctcgattattctcagcgttgtaataactaagcaaagaaaagtcgctttcaatgctttttctaattgccatcatcgcttactattgcgtggaccttgaagccataataatagactttcttggttgctttataaccaatatcagctacgccccgaaagatcttgacacgataattgcaaacaggctggcaaactggcactgggaaactatcaataatcaaaaattctccagctgtctttacttcttgattccaagcctgacggatacaacgaattagaggcaagagcattcgagctcgacggttaaaacgagaatgagataagccaacgaagaatttacagaatcttcgttgagattcaattccaatttcagtttgccaaatgagcatcgctaagatagaactatcaggaagcttggtctgatcaacatttttacgatgtttaagtccatcaggcgcataaagcttatatagcgagcgacaaatcacatttaaccgattaaaactaacttgtaaatggtgagaaaaacgcttaagcttgagatagttcaattagatcagactcttttctatttaaattacctacaacttttattaactaaaacgatttaactagcaccacgcgtataattaatgaatatttcaaaaactgtattggcgttataccaaacaattattggtgaaaaacagaaacgcttaatcaagacagtagatgcttatttggacattaactacggtgataaagtttatcagataattgatcaagttaaggaacgtaatattccaattttgtcttttggggatatagcagatcaaaacaatacttactcaaactacactgtttttggcaatgatcaagttgacgagatggtggataaaattaatgaaatcatcaataaccaaaataaataaaattatcttttgcattttacagcaaagcttgctataataattaactgtaaattctacctaagactcgggtggcatgacgcctcaaaatcccgccgaggccagaagatgatgaagatttttatgctccatgtctttcggcatggagtttttgcttttttaaggccttatagaatttatcaatgtgatcatggaggtgaaataatttgagtaaagctgctattgctgaaaaagaaaagttcgttgatgcatttgctgaagaacttaaagctgctaaggcaatcttggtaattaactaccttggtttgactgttgaagaagttactaacatgcgtaaggaacttcgtgataacgatgttaagatgaaggttatcaagaacacctacttaagacgtgctgctgctaaggctggtatcgaaggtcttgatgatacttttgttggaccaactgctgttatctacactgataacgctgatgacgttactgaacctgcacgtatcgtttctaagtacgaagatgactttgacgttatcgaaattaagggtggtatgcttgaaggtaagttgacttctaaggatgaaatcaaggaacttgctgctatcccaggccgcgaaggtttgctttcaatgcttgtttctgtattacaagctcctgtacgcgactttgcatatgctgttaaggctgttgctgaatctaaggatgaagactcagctgaataataaagaaatttatatttaatatctaaattctaatttttcggaggatacttaaatggctttagatactgataagattattgaagaattgaagggtgctaccatccttgaattgaacgaccttgtaaaggctattgaagacgaatttgacgttactgctgctgctccagttgctgctgcaggtgctgcagacgcaggtgctgctaagtcagaattcgacgttgaattgactgaagcaggtcaagaaaaggttaaggttattaaggcagttcgtgacattactggtcttggccttaaggactcaaaggaccttgttgatggtgctcctaagaacgttaaggaaggcgtttcagaagacgaagctaacgacatcaaggctaagcttgaagaagttggtgctactgtaacccttaaatagttacagcccaactgggcaactatgaataagctctttgctatgtgcgaagagcttatttttttgtataattaaatttatgatgaaagatatagaaagaagactaacgccatatcaatgggtaatggccattttagctattatttcgatttttttgattattttagattttgctgcggttattaatattgatgaaccgactagtaaatggttctggatcaatagtgcaattgtagtatattttgcaattgattattttcgtggcttacatgcagcagaagacaagaaactatatttcaaaactcacatttatgacttgctgagtattattccaatggggttattgtttatcagcttaaatatttttaatttatctgggctggtatcagatttgcggcatttgcgtttgattcgattagctggtttgatgggaaaattacgtaatatttttcatactaatggcctactctatgtaatcttttttacaattacatttttgttggtaggagcggaagcattcgcaatcactgaacatgtaacgctggatactgctttttggtgggtcatttcaacagcttctactgtcggttatgatgcaatttttggcaaaacaattccaccgcatagtattgtaggaaaattcgttacattagtaatgatgcttttaggaattggaatagttggtatgttaacgtcatcgattacttcgtatttgatgaggagaacgaatggcgcgaatacgttaaaaacgcatgataatattcaattaattttgaaaaagcttgataatttagaaaagcaaaacaaggatttggctgatcaaaacaaaaagatgcaagcacagattaatgaattgaaagatgtacagaatacaacggagctgcataagataaaagaatggtttgagaaaaagaaaggttagttaaaatgagtgaagaaaaaaatcaaatgtattttgcgactgatcctactgccaagcatgatcaacatgttgttgattatcatgtggataatattgatttgaaattcacaacagacgcaggtgtcttttctaaaatgagggttgattatggctcaggcgtattgatcaaggcaatgaaagatgttgtttttcctaaggataatatcttggatgttggtaccggttatggtccgattggtttatttgcggctaagttttggcctgatcaaactgtagatatggttgatgtaaatgagcgtggattaagcttggcaaagcagaatgcacaagttaatcacatagataatgtaaatatctattcctctgattgttatgaacatgtggataatgataaaaagtttggtctaatattaacaaatccgcctattagagcaggaaaaaaagtggttaatgagattttactgggagcaaatgagcatttggttaatggcggtatcttattagtagttattcagaaaaagcagggagaacctagtgcgcgtaagctgatgaccaatacatatggtaattgtgaaattttaacaagagataaaggctattatatcttaaaatcaactaagaaataactaaataaaaaatgcttgaaagtactattaaataagcattagactttataaaagtgctttcaaaactggatttatcctcgtataataatcttgtaaatatcaagagtatgtgaagaggataattattatgaaaaaggcttggaaatacattgttgcagtattgattgtaattgttggtgtgtttatgttaggtatgatttccggtgataacgagactgctgctccagctggaattgctgcattatacttgatcttgtcaggaatctttttctaccacaactttagaaatcgtaacattgaaccattgtaaaaagtaagcagctagtcgcaaatagctgcttttttgatacaataaataaaaacgatgaattgagaagtgataaaatgctgtctggcgaagataaaaggaaatacatgcaattagccattgaccaggcaaaagaagctgaaaagcaaggagaggtgccgataggggcagttgttgttgatcctgatggccgcgtagttggtactggatataacaggcgtgaacttgatgaagatgctacccaacatgcagaaatgattgcgattaaagaagcttgcagtaagttaggcatgtggcgcttaattgactgcagcttattcgtgactttggaaccatgcccgatgtgtgcaggggcaattattaattctagaataaaagacgtttatttcggtgcacttgatccaaaagccggagcttgtggatcagttgtggatttatttagcgtagaaaaatttaatcatcatccgcatgcaattcgtggactgtatcgtgatcaatgtgcacaaatgctaaaagattttttcagagcgattcgtgagaaacaaaaagcagctaaattagctcaaaaagaagtataaaatcagtaatttttaaaacaagatgctggtaatatttactgaaatacgttaacatagttgttgggcaatgtttgacctctgaattgtgtcaggaccggaaggtagcagcactaaggttgttcaggcatgtgccttttttgttagaatattaacagctcttagctcttcgagagctaggagcttttttacttaggaaagagaatttatggcttatcaagcgctatatcgtaagtggcggccgcggacttttgacagtgtgattggtcaagaagcgattaccgataccttaaaaaatgcgattaaacgtggtaaggtttcccatgcgtttcttttcgcaggaccccgcggaactggtaaaacatcttgtgctaagatttttgctaaggcattgaattgtactaatttgcaagatggcgaaccatgcaatgagtgtgctaactgtattgcagctgatcaaggttcaatgccagatatcatggaaattgatgccgcttcaaataatggggttgatgaaattcgtgaaattcgcgataaggtaaaatatgctccaacggaaggtaaatacaaggtatatatcatcgacgaagttcatatgttgtcgatgggagcttttaatgctttgctgaagacattagaagagccaccagagcatgtagtatttattttagcaacgactgaattgcaaaaagtgcctgcgacaattatttctagaacgcagcgctataattttaagcgaatttccaaagaagaccttgagaagagaatgaaatacattcttgatcaagaaaatattaaatatgaagataaagctttagcagtcattgctcaagtagccgatggtgggatgcgggatgctcttagcattttggatcaactgttgagttacgagaaggaaagcgtcaactatgatgatgctttgcagattacaggctttgcagatcgagaaaatattgaaaaaattcttttagctttgttaaatcaggatgcaggtcaagccttgcagtttacacaagatgagttggctaaaggagctagttcaaaaaacattttagatgaaatcatcgatctaactactaagagtttattaatcgtcaaaaccgatgaaaataaacaggaaacttttttaacaaaagactttattgaaaaaataaagagcgtttctacagatagttattatcgattgattaatttggctaataatgccttgaatgatttacgctatactaatcagcaacagataccactggaagtgttcttagtagaagcaagtagtactgcaccagtgcagacaagcgctgccccagctaagacaacaccagctcaacctgcacaaggtaatactgatttgcaggctgaactagcagcgctgaagaagcaagtcgttgatttaacacaaaaacttagtgaagtatccaataagccaagtttatcaacaaatcaggtatttcacttggatactgcggtacctaaagtggctcctaagcctgctgttaaaccaaaagagaagcaaactaaaaagccggttagaaaagtcaaaaaaactacggcagaaaatcgcaaacaagtatatcatgttcttgaaaatgctactcgaaacgatttagagacaattaagaatgtctggcctgatttacaatctgttttagctgtctctgaaaaagcactgcttgatgtattagaaccagtggctgctagtcctgaacaagttgtcatgaaatgcaaatatactttatggtttgaaaatgcgagcgcagataatgatctgttagggcgcttaacagactatattgaaaagtttgctaaacattcttacggcattgttttggtgccagataacgattggctggcagttagaaaagaatttgttgaaagccataaggatgagctacttgctaagaaaaagcaacagattgagattcaagaagaaaagtcagatgaaccagaagttgatccagaagtgattaataaggcaaaggatctttttggggatgcagtcaatattaaagactaaagtactatgagcaatgattataatattaaagttttaaataaagaaacaacattacagatcttactagaagatcataattctttgattcgttttggagatggagaattagatttaattagaggagcaagtattccgtatcaagattatcaaccggaattagctggttcgctaaaagagctcctgttagaaggcagcaatcgccgtttattagtaggattatctgatgtttttgaaaagttagatcgctataatgattattgccgtaatttttatcaaaatagtttcttcccgaataatcatgacttgttaagagaagttgaattgcaatacaatgtatacgtttctactttcttttcacggccatatattgatttagtagataaaagtcacgctaaagattattttgctaaaatgaaacagctttggcaggatcatgatcttttaattgtagaaggtaaatatagtcgctcaggcgaaggcatgacttgttttctaatgctagatcaattagtagactcatttgtccgccaactaatgcatatagtcgcaaaaaagttattgaagatgaaattattaaaaatgcagctaataggttgattttactgatgttaggtcctactgcaaaagtgattgtggctgatttgatagctcagcttaataatcaaatgattgatatagggcacatcgattcagaatatgaatggatgaaaatgggcgtaactaataaggtgaagataccgcataagcatactgctgagtttaattttgatgataaacaagttaaactagagaaagacgacaattttgataagcagattattagtataatagaataataaaggagaaaaattatgagtagaagacctaattttggtggtatgggcatgggcggcatgaacatgcaacaaatgatgaagcaagctaagaagttgcaagcacaaatggcagaagagcaggaaaacattactgctcaagaatttactggtaagtctgccgatgatttagtagtagctacctttactggtgaccgcaagttgaaggacatcaagattgataaggaagcaattgatccagacgacccagatatgttacaagatttggtaattgatgcggttaacaagggcttgaccaaaattgatgaggcaactcaggcaagcttaggtaaatacacgaaaggtttgatgtaattgcaatatccattaccaattgctcatttaattgatgcttatatgaagctacctggaatcggtgaaaaaacggcgactcggttggctttttatacgatggatatgcctgatcaggatgtcgatgattttgctaagtctttagttcaagtaaaaaaagacattcatcaatgtccgatctgtggcaatattaccgaaaaagatgtctgtgatatttgctctaatcctaatcgcgatcaaacaactattatggtagttgaacaaccaaaggatttgatggcttttgaggaaatgggcgaatatgacggactttatcacgtgcttcatggtgttctttcaccaatggatggaattggaccagaagagatcaatatcaagtctttaattacgcgtttgcaaaaaaatgatgctgttaaagaagtgattttggcgcttaattcaactccagaaggcgaatcaactgcgatgtatatcagcaaattaattaagccagctggtattaaggtaaccagattggccgctggtttgtcagttggtagtgacattgaatatgctaattccattactttaaagcgcgcagtgcaaggaagaacggcattataatggctaataaaaagcaagcaaagatcaaagcaatgggtgatcaaaagttggtagccgagattgaaaagctacaaaatcaaattgcattagagcaagatctcgatcaaacaactttagatttatccgaagataattatgtgcaaaatcgaatcttaaaggcaaagtatacttttttgtataatgaagctcgtcatcgaggcacaagatttagtggtattactaatgctattacccagtagaaaaagaccgaatattggtctttttttattttgaataaataaaaaatagtaggactgttaatctctatgaaacttctgtagaatagacatatggaggattttatgagaggttattttgttagttttgaaggccctgatggcgccgggaaaagtacagttttaaaagaagtattgaaccaaattggttcagagcttaagacacaatatcttgtgacgcgtgaaccaggcggttcaaaaattgcagaaaaaattcgcgacattattttagatcctgctaacgacaagatggacaataagaccgaagcgcttttatatgctgcatcacgtagtcagcatgtggaggagattattcgtccagctttaaaggaaggcaaagtcgtattttcagatcgctatgtcgatagttctttagcttatcaaggagcgggacgtgatttaggaattcaggaagttaagcaaattaatgattttgcaacggataaattagatcctgatcttacttttttcttagatcttgatcctgaagtagggttaaaacgaattgaaaagctgcgtccgggtcaggaagatcgtttggaacaagagaatcttgcctttcataaaaaggtttatgccggttttctcaaggtaaaagagacgtatcctgaacgcttcgtaactgttgatgctacgcagccaattgatcaggtagttgctcaagttattgcaacattaaagcaaagaatgccagagttattttaaggattgatttagatgaagttagtaattgcaattgtgcaaaaagaagactctaatgatttacaacgggcctttgttcaaaatgattttcgtgctactaagttagcaacttcaggtggttttttaagtcaaggaaatactacctttttagtaggttgtgatgacgataaagtagacgatgtattaaagattattaaggaacagtcccgagcaagagagaaaattgcaacaccacatatggtttcaactgggtatgaaattacacagcctttgaaagtgacagtcggtggtgcaacttgttttgttgttccggttgatgagtttaaacgcttctgatgattgatcttagtaatgttgggaaaaagcaaacccaatttttaaaaagagcatatgaccaaaaaaagttagctcatagttatctttttgttgatagcgatgaggcacgggcattgaatactgcatactggctagcttgtttgtttaattgtactggtgaaaataagccggatggcagctgtcaaaattgtcggcaaattttgtcaggtaaccacccagatgtattgctagtagcgcctgatggaaaacaggctctagggattgatcaaattcgtcccttaaaagaagaattagccaaaagcccagttgaaagtactcgccgtttcttctttattaatgaagcacaaaagttaactttagctgcagcaaacggtttattaaacttactagaagaaccagtagcgccagtagttacgattttgattactaacaatagtgatcagattttaccaacggtgcgttcacggacccagatcattaattttgacaatggtgagagggctagtggtaggactgcagtcttactggagaatggtttttcaaaagcagagattgaggaactgggtaatcttgataaatggaatcaggcaattaaatatttttatcaagaaatgctggaacacaacagcttagcacttgtcagtgcacataagctagctgctgatgctaagctagtgtcagagcagggttacatcttgcttcagttaaaattattggccgagcaagatttgcgtaatcctgctaaaagaataatggcggcgacaatgcttaagaatttaattgaaatagacaaaatgcgtttgagtaacgtaaatttacaaaatgcgttagattatctcgccttaaaatggaagtaggtgtttagattggatccatattcaaaactgaaaaagattgaagaaacaacagaaaatatgaccaagacgattgccagcttggaaaatgatattttagaaacattaaaagaaaacacggagttgaaggtagaaaatcaattactccatgagaagctggacaagttaacggcaaatcagcctgcacctgagactaaaacgcagagtggcttggaatcattgaagaagatttatgattcagggtaccacatttgcaatatgtactatggctcgcatcgtgatccaagtgcagattgtatgttttgtcttgatattttggacaattttggcgaaaaaaagggcaagaaaaaggacggtagataatgaaacgtcaaagcagttatgcaaaagatgaaggaaagctttatttagtgccaactccgattggtaacttggaagatattactattcgcgctaaaaaagttttaaccgatgcagattatgtagccgcagaagatacaagaactagtgggattttactggaaaaaattggggttcataataaaatgatctcttttcataagtataattccaaggagcgggcgccggaattgatcaagttgatgaaggaaggtgctgtgattgccgagattagtgacgcggggatgcccgtgatttctgacccaggttatgtattagtacaagaatgcattaagcatgatattccggttgtaccacttcctggtccaaatgctttttcaactgctttgattgcttccggttttaatcagccatttacttattatggctttttaccaagaaaatcatcggaacagaagacctattttgcacagatgcgcgataatagagcaacatcaattttttatgaagccccgcatcgtctagcaaaaaacctcaaaacattggctagtgtgctgccaaaagatcgtcaaattgtagctgcacgtgaactgaccaaaatccacgaagagtttatccggggtagtgtggaagaagttacgaattacttcaatgagaatgctccacgcggggaatttgtgattctagtttcacctaatacagaagcgcctcagcaactatcttggacagaattaattgacttagttaatgacttggttgaaaaaggtgaatccaagaaagatgcaattaaacaggtagccaagcagcatcatgtttctaagaatgaattgtatgatcaatatcaccaggattaattatgaagtataccgaagaatatcaaattgaatttaaagattgtgacgaaaatcggcgtttaaaattaccagcactagttgagttaatgatgcaggtttctgagcatcaattaagtcaaggtggtgctgggactgatgacttggttaagcgtggtctaggctgggtcgttactcaatatcattttgagattaaagacctgcctaaaccgggtgatcaagttattctaagtactgaagctagcggctataatcgtttttttgagtatcgtgattttggcgttagtacgcaagacggtaagccattagtgactgtaaaaagccagtgggtaatgctcgacttgaagaagcggcatatggtgccaaccgatactaaaatgatggaagattggggtgcaccactacttaaaaagatgccacgttttccaagattgcgtccgcaaaccgaatacgagcaaaagcgttcataccgtgcgcgttacgatgacttagatactaatcatcatgtaactaatagtcattatttcagttggtttgttgatatgttggatcgtaactttttaaaagaacatattgttacagcaattgatattaaatttgataaagaagttcattatggtgagagtataaattcttgcatggacttggttcaatatgatattattattacatctcatgcaattgaagcagaagatgggacagttaaggccgtctgtgaattaagttggcgtgagatatagtaacaacatgacgctattagttgtttttatttaggggaggaatcggtcaaatgaatacaaagaaaattttacgaacggatttacagcaactagtctttttaggtattgttgttgcaatgaaaattattctaagtcagttttcttttggtccagtaatggttaaagtgggactgggtttcattgggagtgtgctattaggatatctctttggtccgctctggggaacaattggcggtggaattagtgatttaatttcatctgcactttttggcgatcaaggtggctttttcattggttttactttaacagcaatggcaggcccatttatctacgccctgtttttatataataagccagttaaaatttggcggattattgcttctactattctggtgactgtaattgtcaatattggcatgaataccttatggctacatattatgtatggtatcaatttcaatgcggctttgatccaacgtttacctaaggagatgatcgttccttggattcaaatggttatcagctactttgttttacaagccgtttctcgtgttaaaataaaaaagtgatttaaagcgaaaagagaaaaatgtataaaatgaaaattttaagtgtttcgacagctactaatcatttgagcgtggccttgaatgatggtcaacaaattattgttgagaaaaatgaacgagatgagcgtaatcatagcgaacatcttgatccttggattgatgaaatcttaaaagataatgatttaagcttaaaagatattgatcgttttgcagttgctattgggccaggttcttatactggactaagaattggaatcactactgttaagatgtttgccagcattttagataaagaggttgtaggaatctcaactttacaagctttggctaaaggcgttcaagaagacgctttggtaattactggtttagatgcaagaaatgacaattattttgcggccggttatttaagcggtgctgtaccagagaatgtcattccagacggtcattacaatatcgacgttttaattaaggcgattcaagattatgcggccaagcatgaagttaagaaaattgtttttgtgggctcaggtcttgaaaagcaagatgaaaaatttaaagctttgaatattccatatgtttatggaactgaagaagagaatgtcatccatgctgggctaattggacaattagctgaaaatgcggttccagttgatccagataaattattgccacgttacttgcgtcgaactcaggctgaagtagactggcataaaaagacaggcaaaccattcgagccagatagtcattatgttgaagaagtttaatcaatttttccatcaacagttaaatcggattgatatgagttttaccccgtttattgcgaatgtaaacggtaagagactacaaattatgcaagctacagatgacaatattcctgacctgcttgtattagaggagcaagtttattcaggtcggacaccgtggaataagttttcatttgagcgagaactagagaagcggcataattgtctttatttggtagtgtattatgaatcgatgctagttgcatttattggtgcgcgttttactccagaagagacgcatattactaatattgcagtagcgccggcttttcaaaatatgcatattggtcgttacttaatgcaattgattattgatcgggcgcgtgaaaatgacagtgattgcgttagtctagaggtaagagtagataatgagattgcccaaaagctatatcgttccttaggttttgaaggtaccttcattcgtaaaaactattaccatgatactcataccgatgctatgaacatggttttatggttaaaaccacatcagattaaaagaaagaagtttacgttttgagtgaaaaaaatgttcgcattttagcttatgagagttcttgtgatgaaacttccactgctgtcattaaaaatgggcgtgagattgaaagcttaatcgtagcaacgcagattaagagtcatcaacgctttggtggtgtagtccctgaagttgctagtcgtcatcatattgaagtggttagtcagattactaaagaagctttggctgaagctaattgtacttggaaagatatcgatgcaattgctgtgacttatggccctggcttagttggtgctcttttaattggtgtaagtgcagctaaggctgcttcaatggcaacgggtattcctttgattggtgttgatcatattatggggcacattatggcagctcaactaaaagatgagattgaatatccagctcttgcattacaggtttcaggtggacatactgaaatagttttacttaaggatcctgttcattttgaaattatcggtgatacgcgcgatgatgctactggcgaagcatacgataagattggtcgtgttcttggggtaaactatccagcaggtaaaactatcgatgcctgggctcatgaaggcaaggatacctttaacttcccacgagcaatgatggaagatgatgactatgacttctcattctcaggtttaaagtcagcttttattaacacttgtcatcatgctgatcagattcatgaaaagttgaataagtatgatctggctgcaagttttcaagcagcagtaattgatgttttggctcataaaacaattcgcgcaattaagcaatataagcccaagacctttatcatgggtggtggggtagctgccaaccatggcttacgtgatcgcatgagtgcagaaattgctaagttgcctaaagcagaccaacctaaggtgattttgccagatattaagttgtgtggtgataatgctgcaatgattggggctgctgcgtataatctttataataatggtcaatttgcggatttgactttgaatgctgatccatcacttgaattgccatatgctaagagcatgttgaattaaatagaataactttttaaatcaaatacctagaacgattatttctaggtatttttttctactaaggcatggtccttaggatcttttaaatctaaggcgattgattcgtaagcgtcaaataaaatagtgtacttaaaaaccgtcccagttactgttatactgagacggttatttaagttcttttatttacaatttatctggatcttctcttgccacggtaaataagcttcaagggtttccgaatccagaatctcttcattcggtaatttctgaagcaaataattcaagtacttttcaggatcaaggccatttctcttggcagtttcaattaagcttagaataaagccacttgcagtagcaccctcaaaactttgagaaaataaccaattcttccggcccatgacgagtgattttacagcgcgttcagccttattgttagataattctaaattgccatcaagcaagacatgctcaaaagtagcttgatgcttgagggtataattaatggctcttcccaatttagagcctggcaaaacggtgattttatttttctcacaccagttgaagaactcttgcatcagaggcttgagctttgcttgtcttagctggtaacgttcttgtttgctcaaattctcccaggtttgttctaagtaaaacatgcgattgcagtagttgagtcctttttgggcaagggacttttcagaagcctgttgtggtacggcttcgtgaaactttcttctaacatgagcccagcagccaactaaagttgctttcggcaattgctcataagcctgccacatatcacagtgcaaataaccgggatagtttcctaaaaagtttaaggcagccttgcaactccgggaaggatcatgatgatagagtgtaatcccgtattgatcatgtttgcctgaaaggaagacccaatagtaagtcttgattgttttactttctaagactgtataataagtttcatcggcatgtaaaattggccgcattaacagcttttgcttaagcagatcatacactggtttaaagtagtattgactgcttttcaaatcccaataatttaacatctgtcttgaaacttctagtcccatcttcttccagtcgctttcttgacgatagtccggcaccttcatttcatatttttgataaagtgaatgagcgatgagtgaagctgaacctagaccatggtttaggggagctttaggtactgcagctttaatgatcttgtcgctaagatttctttgactgcaatatttacatttgtaagcatgttggatatggtctaaccttttaagttgagctgggataaacaataattcttggcgaactgactgcttgcctatctcaatcagttcatgatgacaatcaggacaatgcttgtcgcctaattcatggtgaacctcttcagctggaagggcagctagtaagtcagcacgctttcgtttgtgagcttgtcttttataagtaatagtctgaacggcggcgtcggggacgttctccgtcatcttgagcatcaggttcatcaaagagacttgtttgtccatttaaaggcatttgttctgaagatttgccataacgtttttgcgttaagtaagctacttgttcacggaggagcttaatttcatcagttaagttttgaatagtagttgcttgttgtgcaataatcttttccaaattttcttgtgacatgagttaaacttcctcctaaatttattagttaaaagaatatcaaaaaagcgtgcgatgtcaagtgttagtagaattcgcacgctttcgtgttctttatttttggattgattgcgaagcccttcattagccagtcgacctgctcagaagataaagcttgaacttcattttgattcctgggccagttcaattttccattttcaaatcttttgtagagcagccaaaaaccttgtccgtcccaataaagggctttgaagcggtccttgcttccgccgcaaaagaggaagactttgccgctaaaaggatcaagttcaaactgttctttgactaaagttgctagtccatcaatgcctttacgcagatccgtcttgccgcaaacgatatagacttgccctaagtcactgagcttaatcatggcaagactttctcaagcagcttattcataatttcagggtctaagctgctgtaaaaattcagctctaagtcattcttctttaaactaagcaacagattattgcgtggtggacgagccttcttaggtttagaagaacggccaagtgccacaatgggttgttgtttttcgatcatattcttaacctccattaaattgatgagattagaatacctgaaaaatacggactaaaaaagatactcggttatatgacgcttacattgattccttgcctgcgttacaaattctaaagtattcgctagaaccatctgcgatatatggccccatgtgacgcgtgtcatcgcctgtttttctttcgatatgaattacccgggcaccactatctgcgagcattctggtacaagtagggcctgagaggacgtgggtaaagtcaataacgagcatcccgcttaaaggataaggtttgtttttatctaaatgactgttttttgcttctagctcagcataattaggttctgtcatagttgtgcgctttctattttaaaaagaaaaagctgttcgaagtgaacagctttttgatgagaataaattaattattcacccttgataacttcagtacgtggattcttaggaccttgagccttagaaattacgccttcttcagtcaatttttcgatttgatctggatcataaccaagtgaagctaaaatttccttgttgttttcaccaagatctggagcacgcttgtagttagaaagtgagaatggcaaaccaatagtcttgaacttaccacggttaccaccttggtcgatggttacgatagtaccatccttgttcaagtccgggccattttcaatttcgtgccagtcaagaactggacctacaggaataccagcagcaccaagcttcttagttaattcatacttgtcgtattgcttagtgtagctttcaattaatgggtaaatttcttccttgtgtaattgacggttgtgccagccatcaaagcgaggattagtttcccaacctttagccttgtaagtccgaccgataacttggccaccttcagtgttctcagcacgaggaattgccttgccccatttccagttagggtaaacagcgtagtgaggaagggcacctaagttgtctaacatgatttggttacgcaacttgatacggcagaggttcaatacagcgtcttgcattgactggtaaacaaaaataccttcactggtgtgttcacgttgaagaagggcagctaagataccaatagtaaggtgcatccctgggtttgagtcacctaaagtagcagctgattgagtaggaacgttggctttgccttcgttccaaccagtagcagaagcagcaccaccagcagattgagcaactggttcaaaggccttaacgttttcaaaacgtgaatcttcattgaagcccttcaatgatgcatagatcaatcttgggttcaaagcgtgaagcttttcccaaccaaaaccgttacgatcagctgaacctggtgcaatgttttcaacaaagacatcagccttcttagccaagtcgtacataatctttttaccttcatcagtcttgatgttcaaagtcaaagacttcttgttggcgttcaattgcaagtagtaaagactccatgaatcttgaatatcaagtaattcatttctagtagggtccccagtgttagtacgttcaatcttaataacttcagcaccaagccatgctaaaagttgagtacatgatggaccttattgaacttgtgtccagtcaacaactttaataccttttaaaggtgcatattcattttcttcagtcgtgattaattgtccttatcttcaagttgtgctaaatctaattctgggtttaagttaccaatgtgaccagattccttacccattgattcaggaatttgagcatcaataattgaaggattacctgattcgtaggccttttcaagagcatccttcatttcagcgtagttacttacacggtagctgtcaccaccaaaggccttagcgatttcagcatagtgagcattgtggcttaaaacagtaggtcctaattggtctttaactgggttacggtcaccattgtagataccaccattgttaatgatgacaacggtaacaggtaagtggtaacggcagataatttccatttccattccgtccaaaccaaaggctgagtcaccatgaagtgagatgactttcttaccagtttcaacagctgcagcaatggcataacctaggccgacacccattacgccccaagtaccagtatcaagacggtgacgaggcttttgcataccgattaagttacgaccaatgtccaaagtgttggcaccctcacttacgatgtaagtgtcagggtgcttttgcatcaagttattgataggttcaattgcactgtagaagcctaaagttggcttagcttcagaatcagcgattcttttagcaaatttttcattgttagcttcacaggcattcttaattgaatctagccagtcttgaggggccttaacgttagctttttcaaggggtgcgtttaatttttgtaaaacagaagtaatgtcaccttgtaatggggcatcgatctttctgtttgaatcaaattctgttgcgtcaatatcgacttgaacaaacttagcgtcttcattaaacaatggagcctcaccatttgaaagcatccaattaagccgagcaccgattaataagactacatcggcttgacctaaagtaaatgaacgagctgaagcagctgatgatggtgagtcatctggtacaacgcctttagccattgacatcggcaaaaatggaataccagtcttagtaactaattctctgacttctgcttcacttctagcataagctgagcccttacctaggataatagcagggtgtttagtgttctttaataattcaacagcacggtcaattgcatcatctgatggcaattgctttggagctggatcgactacttcatagatatgagcgtctgacttttgtgcaactgtgtcggcaactgttgcagcaggaaggtcaaggtaaacaccaccaggccgaccgctcatagcagttctaacggcacgagcaactgctaagcccatgtcttcagcacggtcaacacgataagctgctttacataaaggtttagcaacattgtattgatcaagtccttcatagtctccacggtcgaggtcgatgatatgacgatctgatgaacctgagatcataatcattgggaagcaattcttagtggcttctgctaaagcagttaaaccatttaagaaaccaggagcagaaactgttaaggctacaccaggcttgccggtaagaaaaccagcagcagcggctgcgtctacagctgcatcttctcttctaaattcataaaacttcataccctttaattcagctaaacgggcaaagtcagtaactggaatgccgacaccaccatgcatgttgtttaaaccgtttgcttgtaaagcatcgattaaaagtgcagcaccagtaagtgatacatcttgtgtcacgaaaaaaaattctttcaaaaaatccccaaatgcttatgtttatgcatttcaaaaccaagatacacctcttgaattgtatatacaggcacaattgaataataaggtacgttattttaatatgcgcatataaaaataagcaagtcctaatatattagaacttacttattatacttttattcaaaattgtccatttcttcgattgccttttcccaggcagaatttgcttcatctaatttctgttgtacatcagaaagctgttcttgcagtggccccaatttatcaaagcttgaagcaatttctggattggccatttcggtttggatttcttgctctcgttcttcaagctgttcaatttgtttttctgcattatcaattgcacgctgcaactttctcttttgagaatcacgttgcttttgctcttggtaagaaagtttttgctggctaatttgtttgcttggctcgacttctgtctcagcggcactattttcagccatagctgcttgttttgccttctcatcaagataataagaataattgccatcgtagactttagcatgcccatcgcgaactaaaacaatcttattagctagttgattgataaagtaacggtcgtgggaaacaaagagcagggtaccatcaaagtcttttaaagctttttctagtacttcttttgcttcgatatctaagtggttagttggttcatccatcagtaagaagttatcatgttcaagtgataaaacagttaaagttaaccgtgctttttgtccaccagatagttgacctacggtcttatcaatgtctttagctgtgaataaaaagctggctaagattgaccgtacatcgcgttcaggcatggtcttatgacgatccccaacagtatccaatacagttttagatggatctagtctttgtaattcttggtcgtaataaccaatctcaagggatgcgccatacttaattgagccactcttgggcgttaattgcttcataatagtcttaagcagggtagatttaccgattccatttggtccaatgatcgcgacgcgatctcctttattaatctggaaggaaatatctttaaccatggttttatcgggataaccaatcgtcaaatcgttgaaaattaatacttccttgccagaaggatgatcgcttgaaaaatgaatccgtaccttatttttatgtttaggtggagtaatccgctcaattttttctagttttttacgccgactttgtgcacgcttagtggtagttgctcgaaccaagtttttttggataaattcttcatcttttttgatttcagcttgttgcttttcataagcggcttcttggtccttatcacgttgctcgcgctgcatgacataggctgaatagttgcccttaaaagcagttaatttaccaaattctagttcaaaaatttgggctgctaaatgatctaagaaatattggtcgtgggaaaccacgaggattgcaccactataattctttaaaaatccttccaaccaatctagggtatctaaatctaagtagttagttggctcgtccaataacaacagagcaggtttgcgcaaaagcaacttaacaaaagctaaccgtgttttttcaccaccggataaactaccaatcttcttttgccaagtgtcttcaggaaacttaaagccattcaagatacttttaatatcagattgataagtataaccgcctttttgttcaaagttgaattgcttttgatcgtattgcttaagcaattcttgatcttcaggatgatctgcaattttttcttgtagttggactaagctttttctttcccttattaaaggagcgaaaacggtttccatttcatcccaaatggttttattttcatctaatgcattttcctgagcgatataaccaacatcaatgcctttattaactgtaaattcgccgtgagttggttcttgctcacctgtcattatttttaacagggtagtcttaccaaccccgttaggaccaactaagccgattctggcattggaatcgattgaaaaattaacatttttgaataatgtgttggccccaaattgttgttctaaatcgtgtccttgtgcaataatcataatttttcacctaaccactattctaccatatagcgcaaattgtttgtttttaagttaaatatgtgaaaaaatgatgatttgtgaaaaagatacttgcataagtactatcatagcaggtatgatagtagtgcttgattgtacattcacaaacatttaagtttggagggttcctatatggaaaaaataaaaatcccaaaagcaacggcaaaaagattaccattatattaccgttatttgattattttaaatgaagaaggcaaagataaggtttcttcaactgagctgtcagaggcagttcaagtagatagtgcttcaattagaagagacttttcatattttggtgcgttgggaaaacgtggctatggatatgatgtaaagaatttattgagcttcttcaagaaaattttgaatcaagatactttaactaatgttgctttaataggtgtaggtaatctgggacgggcgctgcttaattacaactttaagcgcagtaataatattcgaatttcctgtgcttttgatatcaataaggagattactggtcgtatcttaagtggtgtccctgtttatgacatggacgacttaaagcaacaactaagtgatcaacagattacaattgcaattttgacagttccttcaacagctgctcagaaaaccacagatgaaatggttgatgcgggtgtaaagggaattatgaactttactccgattcgtttatcagctccagctgatgtgcgagtacaaaatgtagacttagcaaccgaattgcaaacgttgatctatttcttagatagtgacaaagaaaactaaatttgagtaaaagaaacatactaacctagtgttggatcatgaatcgacggattcacgatctggcactttttattttgtctaaaatagaaagtgaagataaagcaaatcaagtcttcagctttttagacacttgatgtcgtaaaagaaacggactgctttaccacctattcttaagtctcttcgaagtctgtgggcacttagatgccgtgtttagaaaattagaattaataggttgataaagaggtttatcttcacagcggaggttatattatggaatcacaaattattttcggtattgatgttagcagtaaatcttccacagtttgtgtggttaatgaccggatcaaacaaggcgaatcttttagaatctctaatgattcctttggctatcaaaaactttatgagcaactgaaccaatatttgataactcctttagttgttttcgaagctactggtgtttattctctaagcctgcaagctttcttagaggattatcatattaagtatttgaagcttaatccgcttaaagcgaaaaagctaatggacaataatttacgccataataaaactgataaggtagatgcttatcgcctggctttaattcaatttaatgccccgcaaaagctgcgtgatccacagcccagagagtatcatgaacttcagaatgccagtcgctattatgaagaacttactaggagtatagttactactaaaaatcaattgcaccgcaacctccaatccactttcccacaaattgaagaaatactgtctcatccatctggcagaatttattgggcgcttgttagtcttttcccacatgctggatatgttctagaaaagaatgagacacaggtaactcaaatgcttaattctatttctggaataggacaacaaagggcacggtacttaaccacaagattatacgcttttgctagagaagcttatccttatgattccaaagatagtattatcgttagagctattcaaaggaacatttctaatttattttcactccagcaagaacgcgactatgtaattaactacatggaaaagctggctaaagcagtaaacgctcgtgctttatccatctatttgagtatcccaggggttgctagaattacagcagtgagattagtagcagagctcggtgatctaagacggtttagcacttcagctcaaattgatgcgtttgttggcattgatccaggaaggtaccaatctggtgaaaaagacagttctcttggcattaccaagcatggcaatcatattgccagaaaaatactttatcgagttattactcaaatggagacggtaaaggctacgcagccttgccatataactgattattatgacaagaaaaaacgatcttcaaatagacaaggctataagaaaatcgccattgcatcagtccataaactgatacgcacaatgtttgctcttatcaaacatgatcaattatatgattacaacatagccaccgaaaataaaagactttagctgaaatcaaataatcaacttaagtataagcaacctatggaaaaactacaagtattcataggcttatttgtggtactttcgctttttcttaaatttaaactcttatttgctttaaccttattcgcatcattaaaacaagtaaatttattttcttaaatcattgataatacttgactttgggtagaaaaaagccgattttcggctttttttcatgcagttgtttcacttttgattaatttgacaggcaaaatataattcttttggcgcaatttttcgtcgggattggaaattcgggtaagcaataacttaaccaataaagttgcaatatcatgaattggctgagcaattgtggatagttccgaatggtaagtttgaatttgctttgttccgtcaaaaccaatcacttttaattccttaggcactttaatgcctaatttttttgcttcttgtaaaactaacactgcagttaaatcatctgtgcagacgacgccatcaggctgatcattgactaacatatcatgaattttcatatttttaatgttggaagaatcagaaaaagcaactgaacgaatgtgggctgaaaagtgacattcctttgcttcatcaagataagctgctagtcgttcgtcagtcggattaccttttctgtgttcattgcccagaaagtaaattttgtgacaaccagcttgaaccaagtcatgtactgccaacttgatgccttgataattatcacaactaacaattggaacattatcagatagctttcggtcgaaagagacaattggcaaacctagttgttggtattcattgatacctagattgtgcgcaccagcgatgatgccatcaacttgattagcctgaagcatgcgcagatattcgcgttctttttctttgttttgtcctgcattgcataggattactttatagttttgttggaataaagtggtttcgatatcctgtactaattccgcaaaaaaaggattagtgatctcaggaaaaatcaaaccgactaatttcattttctttccttgtaatgagcgggcaatagaattgggacgataatttaattcccgcattgcggcaaaaactttatctttagttttttgacttaaatagccatggttgttgattactcgcgaaacggtagttacagagcaaccggcttttttggcaacgtcgcttaattttgctgccatagtatcacctgatgtttaaagaattgtttgcatttgccaaagcttgccagtgtagtcaatgtcttgagcaaacgcaatttttttgttggtctgatcggcaaagtagcgtccagtcaataccttttcaccatcattaacgaatacttcaattaatgaatgatcaacaaagatatcaagcttgaggtcatgatttggtgaaagcgtaatagctcgactttcgccataatcaactgctactttttgcccagcatgagcacgatctaatactaatttaccatttttggtatcgaaattgagctgtaaactgttacttaagtcattatttgcagctaaatgtaaagtgccactttggttagccttaattgttaattcaagttcaaattgttggccggcttgatcgctgactacttgattagatatgcttgcttcgtttttgcggatactgcttattgccttaactggcgtttgaattaacttgtcactctttaggtggagttccttcacttgactcaagcagttagcccagttttcatcatcagtagggtaagtagtgtcaggcaagccaacccaactgacttcgtaggcattaccatctggggcgttaaaggcctgagtggcataaacatcgaacccgtgatccaaattgtgtaatttacctggattaattaacttatgattttcccagtcaatatcatcagcaataacgtacatatttgggtaaatgtcatcataagctgctacttttttgtctaaaccctgaggacagaaaatgaccacgactttgccatcaacacggacgatgttgggacactcgatcatgtagcccatgtcttcgttggtaaagtctaagaagcccaattcttcccagttctttagatcctgagacttccaaacgtcaatgtgaccgtgtttttcctttttatcttgggcacctaaaattgcgtagtaagtgtcattttctttgataatttggggatcgcgaaaatgttcggtgatgtgatctggattcttaaataggatggttttgtctgaaactttattatttttatccatccaagcaccgatttgataaggagtacgtacccaattttcatcgcggtggttaccggtatacatgatgaaaagcttaccatcgatttcgcgagcagagccagaataagctccatgtgaatcagccattgtgtctggttcaatacctaagcctaagttttcccagtgaaccatgtcagttgatttgaagtgccaccatgactttagaccgtgaactgcgccgaatggatatgattgatagaagaggtggtaagcaccatcaaagtaggaaaatccattagggtcattaattaagccagaaataggatgcaaatgatagcgcatttggtaaggggagtttgcggcttgtgcttgcaaatgcattaatgtatcagcgtcccaatcttgataaggtaagtaacgtttttctcttgtccattccataaatatacctccatgaaagcgttgtctttttacatgtattttaagttagtatgaaaaatatgtcaaacgtttaacagaaaaaataattattaattcataagtaataaaataaataaagaattttatgtcaaacgattgacatattttttgaatgcgttatcataattagtgaattgagaataaaacgtttacataggagggatcaatatggaccacagaaaagtggctgaacgagtaattaaagacgtcggccgtgacaatattattgccggtgcccactgtgctactcgtctgcgtttagtattaaaagatgattcaaaagtcgaccaaaaagcattggataatgatccagatgttaagggtacttttaaaaccaatggtcaatatcaagtaattattgggccaggagatgttaatgacgtttacgatgagttcattaaaatcactggtttgaaagaattatcaaccgatgatttgaagaaggttgctgcagaaggtaaaaagaagaatccagtaatggatttcattaaacttttgtctgacatctttgttccaatcattccagccttagttgctggtggtttgttgatggctttgaacaacttcttgacttcaccaggtctgtttggaccaaagtcagttgttcagatggtaccgaatgttgctggtatttcaagtatgattcaagttatgtcagcagctccgtttatttttatgccaattctagtcggaatgtcggcagctaaacggttcggtgctaaccaattcttgggtgctacaatcggaatgattatgacgacacctggactccttggtgcaaatcacttctgggacatttttggcttgcatgttgcgcaaactaactatcaataccaggttattccagttttagtagctgtttgggtattgtcaattttggaaaagtacttccacaagcacttgccatcagctgttgactttacctttacgccacttctttcaattatgattactggctttttgacttttacaattattgggccagtcttcaaaggcgtatcagatggtattaccaatgctatcgtttggctatatgacactactggtgcctttgggatgggtgtctttggtcttacctattcagctattgttactactgggcttcatcaaagttttccagcggttgaaactcagcttttagcagcctttgctaagaatccagccagctctggtgactttatctttgttaccgcatgtatggctaacgtagctcaaggtgccgcaactttcgctgtttacttcttaactaagaacaagaagatgaagggcttggctagttcatcaggtgtttcagcacttcttggtattactgaaccagcacttttcggtgttaacttgaagtataaattcccattcttctgtgccttaattggttcaggtgtagctgctgcttttgcgggcttgatgcatgttactgcagccgctcttggttcagctggtttcttaggcttcctttcaatttatcctaagactattccaatgtgggttgtttccgtattaattagttttgctgttgccttcatccttacttatgtttatggtaagggtcatttgaaggaagaagttgctgaacaagatgttccagtaaacgacgcaactgattatgctgaagaaactcaaaaggctgaaaagcttggtaaggaacaaatggcattaaaggatgaagttattgcttcaccagttgatggtactcctgagagtttaactaaagttaatgatcaagtattctctgctaagttaatgggtgatggtgcagccgttattccaagtgatggtacgatctattcaccagttactggtactgtgactattgcttatgaaactaagcatgcttatggcattaagtcagacgatggtgcagaagtattgattcacattggtcttgatactgtaaaccttaagggcgagcacttcgaaagtttcgttaagcaaggtcaaagagttaacaagggcgataagcttggtacagttgaccttgatgctgtgaaaaaggcaggctatgatactactgtcatggtagtaattactaacactgccaactatgcaaatgtttcaagaattactgatgcgggtgacaagcacggcgacaagttgattgctgttactgcacacaattagtttcttctactcctctagaaaaaattaaaacaattagaataaaagacgctaagaaagattgtttcttggcgttttttagtactaagtgttgcacttcaattttaagtttgagtaaaatgttctctataaagaaaaacaaagtgagggtatgttttatgaagttaaaaagtggagttattggagtattagtaactggattaactgtctttagcattaatctaactagctctaaaataaaggcagcgataacagtgcctaatcctaagacagattatgtagttaaaactacttctaatgtgtataagagtaatggtaagaggaccagttttaagacacgtggtcagatacaaaccggtaatgttccagtaattgaatcacaactatatgaaggcaagttcattaatgtgcaaggaactaagacgattaatggtactgcttattataagatcggtcctaacgcatacattaaacaaaataatgttttaaattatgctcaagaaaaagcaaagcttgaggcatatcaggcacaagatgatgtgaatgatgattcagatcagtcaacagaattaagctctgatgatgtgaattttgacatagcttggtatgacaacattaatgaggatccatctccagcgatgttcgatgattcaggatatcataatagagtgattaagaatgctcgtaaattattaggctatttcacttatggaacaggtgcataccgaactaattttggcagttggcgtcatcctaataaaaacggttcaactgattgttcaggatttgtgtggatcgtaatgaagagagcaggatatcgtgtaggaaatgctccattttttactctgccaatggaacgagatgctaaaagtactcatggctatttgaagaaaatttctgccaagaatattcgcccaggtgatattgtgattgttaatactggcaatggtgttggtcaaaacggacatgcagcaattgttgatggcaaatatgatggttgggacacgcaaattattgaagagggcggcaacttaggtgtagatgatgtgcaccgctctagtttaggtagctcactgagcgataagctggccaaaggtcgaatcacttatgctcgccccgttaaatagtatgctctatgctataattttgctaatcaataaaggataataagaatgaaaaagaacagcacgcttaaacatgtctggattatgacggctgtctattgggtagtaggtattctaagtattttctggggtaagcttgatcatacttttgcgtctcaattaaaagagatcaataatatttacgtgttagttttaataattatcttaagcttgccgctacttttatcgctgttattgtcggttaaagtaaaaatgccacgtttgatctgcaatccactagttgctgtaatttatctattagtggtaattgcagcaggtgtagcatataacttacaaaatattattggctacttcttcccaatcatcctcttcattattatggcgctagttgctgttttctatgctttgattaagacttttagcagcagaaaaagtggtaaatatttttttattgatggtaaagataagaaagaatgccatgatttctgggatgcttataagaagtactatgtaatgggattaacttacggcattattgatggtttgattactgtaattagttaaaaaagttaagaaaaatcaaaattagcactcaattgaaaaaagtgctaattttttcttgctttttttcacaaaacagtttattatcatatttgtaagttagcacttagcaaataagagtgctaatgattaatacagtaataaaaaatataatgaagaaaattaaacataagggggactaaacgtgttacaaccaattggtgatcgcgtgatcgttaaagttaagaaagaagaagaagaaactgttggtggcatcgttttagcatcaaatgctaagaagaagccaactgaaggcgaagttgtagctgttggtgaaggtgcttacgcatcaaacggtgaaaagattccaatggctgttaagaagggtgacgtagttctttacgataaatactcaggcactgacgttgaatacgaaggtgaaaagtacttagtccttcacgaaaaagacattttagctattgctaagtaatttagttaaaatttccaacgataattaagtaaattaaggagcatagataatctatggcaaaagatattaaattctcagaaaatgcaagacgttctcttttaaagggtgttaataagttagctgatactgttaagactactattggtcctaagggtagaaacgttgttttggaacaaagttacggcaaccctgacatcactaacgatggtgttaccattgcaaagtccatcgagttaaaggatcactacgaaaacatgggtgctaaacttgttgctgaagctgctcaaaagactaatgatattgctggtgacggtactactaccgcaactgttttgactcaagcaattactaatgaaggtatgaagaacgtaactgctggtgctaacccagttggcattcgtcgtggtattgaaaaagctactgaagctgctgttaatgaattgcacaagattagccacaaggttgaatcaagagaccaaattgctaacgtagctgcagtttcatcatcttcaaaggaagttggtaacttaatcgctgacgctatggaaaaggttggtcacgatggcgttatcactattgaagattcacgtggtatcaacactgaactttcagtagttgaaggtatgcaatttgatcgtggttacttatcacaatacatggtaactgacaacgataagatggaagcagatcttgataatccttacattttgatcactgacaagaagatctcaaacattcaagatatcttgccacttcttcaagaaattgttcaacaaggtaagtcattattgatcattgctgatgacgttactggtgaagctcttccaacacttgtattgaacaagattcgtggtaccttcaacgttgtagctgttaaggctcctggctttggtgaccgtcgtaaggctcagttacaagatattgctgctttgactggtggtactgtgattactgatgacttaggtcttgaattaaaggacactaagattgatcaattaggtcaagctcgtcgtgtaactgtaaccaaggactcaactactattgttgacggtgctggttcaaaggatgctattcaagaacgtgaagattcaatcagaaagcaaattgaagaatcaacttcagactttgacaagaagaagcttcaagaacgtcttgctaagttaactggtggtgtagctgttatccacgtaggtgctgctactgaaaccgaattgaaggaacgtcgttacagaattgaagacgctttgaactcaactcgtgccgctgttgatgaaggttacgttgctggtggtggtactgctttagtagacgttgagaaggctatcaatgatcttaaggctgatactgcagatgaaaatactggtatccaaatcgtattaagagctttgtcagcaccagttcgtcaaattgctgaaaacgcaggtaagaatggtgaagttgttttgaaccacttactcaagcaagaaaacgaaattggctacaatgctgctactgatacttgggaaaacatggtagatgctggtatcattgacccaaccaaggtaaccagaaccgctttgcaaaatgctgcttcaattgccgctcttctgcttactactgaagctgttgttgcagaaattcctgaagaaaagccagctaacccagctccacaagctggtgcaccaggaatgggtatgtaattatatatcttaatgctttagcatttagatatataattcttgattacgaagtaatcaagttcatttacagtgctttagcactaaacttatgcacaaactctcactctagttcaaaaacaaatataattaaaatgacttcgaagttaaacaatcagttcagcttcgaagtttttctttttgtagcgtataatattgtacgtaactctatctaaaatacgaaataggaaagagacataaatgacggaaaaaacaactccaatgatggagcaatattacgaaattaaaaaacaatatcctgatgcctttcttttttatcgcgtcggagacttttacgaactgtttgaagatgacgcagttaaaggtgcacagattcttgaattgactttaacgcaccgatcaaatagaactaagaatccaattccaatggcaggtgtgcctcatatggctgtggatacttatgtaaatactttagttgaaaagggttataaagtagcactttgtgaacaacttgaggatcctaaaaaggccaaaggcatggttaaacggggaattattcaattagtgacgccgggaaccatgatgaatgaaggcccaaatgatgctaaagattcaaattacttaacatcagtaattaccactaagagtggctttggtttagcctacagtgatttatccactggtgaaatttatgctactcatttaaagagtttcgatgctgtttccaatgagctcttgtcacttcgtactcgtgaagttgtgtataacgggtcattatctgaacaaaataaagactttatgcacaaggccaacattacgatttctcgacctactccaattgaaggtgaacatgctgaaatttcttatgttgaacagaatttgactaatggggctgaaaaagaggctacccgtcagttagttggctatttgctttcaactcaaaagagaagtttagcgcacttgcagattgccaaaagctatgaagtaaatcaatatttgcagatgtcacatactgtgcagaataatttggaattggttgcttctgccaaaactggcaaaaaaatgggttcacttttctgggttttggataaaacacacactgccatgggtggacgcttgcttaagcagtggctagctcgtccattattaaacatggatgaaattaaccatcgtgaagaaatggtgcaggccttgcttgatggctactttacacgagaaaatgcagttgatgccttaaagggtgtttacgacttggaacgtttaactggtcgaattgcttttggtaacgttaatgcgcgcgaattactacaattatcacgttctttgcaggccgttccagttattttagatgctttagagcaatcagattcagatatcttggtcgattttgctaaaaaaattgatccattaaagggcgttgccgaaatgattacttccactatcgtgaaggatccacctgtgttgactactgaaggtggcctgattcaaggtggggttgatccgcagcttgatcgctatcgggatgccatgaacaatggaaaaaaatggttggctgaaatggaagcagatgagcggcaaaagacaggtattgataacttaaaggtcggttataacaaggtctttggctattatattcaggtttctaacggtaacaagtctaaggtgccacttgatcgttatacgcgtaaacaaactttgactaacgctgagcgttatatcacaccggaactcaaggaacatgagaatctaattcttgaggcacagacacggtcaactgacttggaatatgatttatttgttaagctgcgtgaggacgttaagaagtatatccctgctttacaaaaattaggtgggcaactagcagcgctggatgtttattgtggttttgctacagtagctgaacaaaataattattgccggccaacttttcacgcagataatcaagatattaatgtgactaacggccgtcatccagttgtggaaaaagtaatgacggctggttcatatattcctaacgatgtcaaaatggatgaaggaaccaacatttatttaattacaggtcctaacatgtctggtaagagtacctatatgagacaaatggctttgattgcgatcatggctcaagtaggttcctttgtgccagctgatagtgctgatttgccaatttttgatcaaatttttacaagaatcggagcagctgatgacttaatttcaggtcaaagtacctttatggtagagatgagtgaagctaatgaagccttgcagtatgctactaagcgcagtttggttctctttgacgaaattggtcgtggtacggctacttacgatggaatggctttagctggtgcaattgttaagtacttacacgacaaagttggtgctaaggcattatttgctacgcactatcatgaattgacagtgatggatgagactctggatcatctgaaaaatattcacgttggtgctaccgaagaaaatggcaagttaatcttcttgcataaaatcctacctggacctgctgatcaaagttacggaattcatgtagctcaattagcaggtttgccgcgcaacgttttgcgagaggcaactaaattattaaagcggcttgaagcacaaggcagtgaactagcaccagtttcgcagcaattagatttatttgcagagcctgtggaaaacagtgttgaagaaactgaaacacaaaatgacaagcccgcaataactgatgcacaacaagatatacttgatgatatttctaatctttatttagcagataagacaccgttgcaggttatgcaaatggtagctgattggcaaaaagatttaaaggatgacgattaatgagcaaaattcatgagttatcggaaactttaactaatcagattgcagccggagaagtaattgagcgcccagctagcgtagttaaagaattagtagaaaactcgttagatgctggtgctactcgaattcgcgttgattttgtagatgctggtttgaaacagattgtagttcaagacaatgggacggggattgcacgtgatcaagttgatctagcctttacccgacatgcgacaagcaagattgccaatgaacacgatttatttaaagtttccactttaggcttccgcggagaagcattagcttcgatttctgctgttagccatgtggaaattctgactgcaactgaaaacgcaattggtattcgagctaactatagtggaggcaataaaaaaggccaagaagatgcagcggctcgtaagggaacaaaaattacagtcaaggatttgttctttaacacgccagccagattaaagtatttgcgtagttcaagaactgaaattatgaagattgtggatattattaatcgacttgcgttaggttatccacatgtgtcttttactttgtcaaatactggcaaaattttattaagaacgccaggaaataataatttaaagcaaacagttgctaacgtgtatggccgtcatatcgcagaaaaaatggaaaaatttgaggcaaaagacagcgattttaagattacaggtctgatgtctaaaccggaattaacacgttctacacgcaattttatttcgattctcttaaacggccgctatattaaaaattttcaattaaatactgcgattctggatggctatggctcaaaattagcagcgcggcattatccgattattgtgttagcaattaaagtagatcctttgttagtggatgttaacgtgcatcccactaaacaggaagttcgtttatccaaggaaaaagaactgggtcgtttaatcaccagtgcaattagtaatacacttgtggaaaaagttggacaaattagcgcttttgctaatttggaaaataaacgtgatacgctagttgatcagcttagttttaacttaaatcaagatgttgtaaatacagctcgtaaaaaagaaccggaaattcgcgaacaagaaaagccaaaatttttaacgattgaatctgatgattcagaagataatattcaaaatgaggcggtaaagcaggatagtgaaaagaaatatgttgatcttaatcagccacgtgaagatgatcaatatatcgttactaagacctggaaacaaaatgttgctctgcagcaagcactaacgccatttcctacaactaggactaatcaggaagtcatttcaagtggggatgaaactttagctaataatctgcctcgcttggtttatgttggacagaccgatacttatttatttgcccaacataatggcgacctatttttaattgatcaggttgctgctagacgaaggttaaaatttgagcaaatttttcacatgataactgccaaaaaagtagtacaacaaggtttgttaacaccaattattttagaatttggtaatcttgattttatgcaaattaaggatcaagtagaacagattaagcaggttggaatctatttggaagattttggacaaaatagttttattgttcgttcgtatccaacttggattcacgataatgtcgaagattcaattcggaagattttagatggttatttgaatgtggataaaggaaaggcaaagaacctgtttagccggatagcagcaatgcaagctaagcgagaaattactggcaagattaaattatctgcagctgaagctgagcaaattttacttgatttacgcaagtgtactgatccatatcatgatgcagatggacggataattttggttagaatgagccaaaatgaattgagaaaaatgtttaagaaggatgaataatgtacgaatattttgaaggtgtgattactgtggttacaccaagctatgttgtagttgatgtcgggggcgttggctacaaggtctatagtcctacaccttttgcctatactcaaggccaaaaagctaaggtctttattgagcaagtggtgcgtgatactggcattactttatatggttttcaaagtcaagatgataagggcttgttcttaaaactacttagtgttagcgggattggtcctaagagtgcaatggcaatcatggcagctgaggatagtaattctttggcggaagcgattgaaaaaggtgaagttaagtacctaactcgttttccaggtgtgggtaaaaagacggcttcacaaattgtgcttgatttgaagggtaaattaggtgattatgttgctcggcttgatcgtccagacaatggtgagaatgtgccgccagcattaaatgatgcactgcttgctttaattgctttgggttatacccaaaaagaagtggatcggatcacgcctaaactggagaaagttgctgcaaatactgcagatcaatatattaaaaagggcttagcattactgcttaaaaagtagatcttggtataatagaacagatgattattttttaaggaagtgaaactggtggcagaagatcaagtaacttcaggtgatattgagaatcctgaagaacaacaaatggaactttctttgcggccgcaaacgctcgaccagtacttaggtcaaaagcgggtcaaaaaagaaatgagcatttatattaaggcggcgcgccaacgtgatgaagcattagatcacgttttgctttatggaccaccggggttaggaaagacaactttggctttcgtaattgccaatgaattgggagttcatttaaagagtacaagtggtccggccattgaaaaggcaggcgacttggtggcacttttgtccgacttagatcctggggatgttttgttcattgatgaaattcaccgtttagctaagccagtagaagaagtactctactctgcaatggaagactactatatcgatattgtgattggcgaggggcagactactcatgcagttcacgtgccgctgccaccatttactctaattggggcaacgactttggctgggcaattgtcagcacctttgcgtgatcgctttggcatcgtagagcacatgcagtattacactatcgatgagctagaacaaattgttttgcgttcaagtgatgtttttcacacttcaattgcgcctgaggcggcccatgaattggcacgacgctcgcgtggtacacctcgtgttgccaatcgcttacttaagcgggtgcgtgattttgcggaagttaagggagaaaaaacaatttcgctcgagactactgaaggcgcgttaaaacaattgcaggttgacgatgagggacttgatcagacagaccgcagattattgagaacgatgatcgaaggatataatggtggtcctgttggtattcggactttggcagctaatgttggtgaagatatggaaacgattgagtcactatatgagccatatttgttgcagcatggttttattttactcacgccgcgtggcagaatggtgacggataaagcatatttacagttaggattaccaattccaggtgataaatagtcccattttctgtataatggttataatatctagaaaataattttaatgaggtggaaattttgaacattttatttttagcaaatgccggtgctgcagcaagtagcaactggatgatgatcggtttatttattattttgatcgctttcacttactttggtatgattcgtcctcaaaagaagcaacaacaacaaagaatgcaaatgatggacaaattgaagaagggtgacgaagtcatcttagttgatggtttgcatggtaaggttgacaagatcaacagtgataagactatcgtggttgatgcagatggcatttacttaacttttgaaagaatggctgtccgtcgtgtgattccagttgctgcaccagcaactcctgcagctgaaactaaggctgaagctccagcagaaaagccgaaagaaaaagcagacgaaactaaaaaagaggataagtaatcatattacttaagagcgtcattttaggcgctttttgttttgctaaaaaaatccttgttgtaaaatagaagtgataattttagttcaaagaaagggatctgaaatgaagaatattcccgttgtaatgattctttttggtggtagtggtgatttggctcaccgcaagctttatccagctttgtttaatttgtatgaacaaggcttaattcacgacaactttgcagtaattggaactgctcgtcgtccttggtcacatgagtatttgcgtgagcaggttagtgatgctattcatgaaacgcacgatactgttgatgaaaatgagttgaaagcttttgcaagtcatttttattatcaatcacatgatgtaactaatgtggaacactatgagattttgaaaaacttggcacaagagctcgatgatcgttatagtgcacaaggcaatcgtctcttctacatggctatggcaccaagattctttggcacaatagcaacgcatattaatgaccaagacttgactggtagtggctttaatcgaattgtagttgaaaagccatttggtcatgatttggcttcagcagaggaattaaataagcaaatcacggcttcatttgatgaaaatgatatttttagaattgaccactatttaggtaaagaaatggttcaaaatatcatgccaatgcgttttactaacccaatggttcaaaatatttggtgcagcaagtatattaagaatatccaagttaccttggcagaacgtcttggcgtggaagcacgtggaggttactatgatacttcaggtgctttgcgtgatatggtacaaaaccatatttttcaaattattactctgctagcaatgccagaacctaaggatctttcttctgctagtgttcaccaagccaagcaagatttgcttaagagtttaattattcctacgccagatgatgtcaagaaatactttgttcgtggtcaatatttgggtagtgatactacttttgcttataagcaagagccaaatgttgatccagagtcaactactgaaaccttcgttgcaggtaaagttaagtttaatgagggaccaattgctggcgtaccaatttactttagaacgggtaaggaatttaaagaaaagaagaaccggattgacattgttttaaagcatattaataatccatatgggcaagctcattctaacaatattacgatcgtgattgacccaactagtgaaatttactttactattaatggcaaacgaattgaccaaccaggaattcgccgtgaaaacttaacttatgaattttcaaaagccgaaatggctaaggtacctgatggttatgaaagattgcttcatgatgtttttgtcaatgattcaactaactttacgcactggagcgaattgaagcgttattgggaatttatcgatgcagttgaagatgcttggcagaaggaaaatgaagcaggcaatccagccattgcacaatatttgccatacagaatggggccaaaggaagctaatacaatctttgagtcaccaactgaacattggatttatgaataaagaaaatttattaccgcaaaatgacatccatcgtcggattattcatctggacatggatgctttttatgcttcggttgaaatgcgggagcatcccgaatggaaaaataaggcattgattgttgggcaagatccacgacaaaatggtggacatggagtagtggctacttgcaattatgtagctcgtaagtatggcgttcattcagctatggccgcaattcaagcagtacgtttggttcccaaggagctaatagtttttactagaccacgatttgataaatatcgtgcagtgtcagctaaaatccattcttttatgcatgatgtgacagatcaggttgaatcagtggctttagatgaagcttatctagacgtgacacatccaaagatagagcaggagtctgcagttcaaattgctttagatttacagaaaaggattcggcaagaagtaggcttaaactcgtcttttggcgtttcctataataagtttttagctaaaatgggatcagaatacgccaaaccgtttggtcgaaccgtaattttgcctagtgaagtgcagaactttttagcaatgcaaaagattgagaagtttcctggtattggaccgaagacgcaagaagagctgcatcagatgggtgtttatactggggcagatttacaaaaaattgaggttttaaccttaattaaaaaatttaagaaaatggggtatattttagcccaacatgcacgtggaatagatttaagacctgttgttacagactcagaggctaatcgaaaatcaattggcatggagcggacttacgagcctgcaatttatactgaggatgaagccctaaccaatattcgtaactattgcaatcatttggaagcagcattaaaaaaacgcaattttaaggcaggtactgttgttattaaagtaagaaataataattttgatacggtaaccaagagaaaaaagttgaaaacaccttctgatagtcacttagatttttatgatgtggctcgtgacttgttcgaagcaacaagttcctttttagatgatggaattcgtttattgggagtcactgtaactgactttgaaaagaaaaaatatcaatcaatcagtttgttcgactaataaataaagctatttttctggtaaactagatacagatatttttacaagatgaggagattaaaaatgagtagttttgatgacatttatgaaaaaatcttacaatatcctacaattatcttgcaccgccacactagtcctgatccagacgcaattggttcacaagctggtttagctagagcattaatggaaaaattcccggacaagcgcatactttgtgctggggaaaacgatgaaggcgacttagcttggattaaccacatggatcaagtcaaggcaactgattacgaaggtgctttggtaattactactgataccgctaatacaccaagaatttctaataagttgtatgataagggtgactttttaattaagattgaccaccacccagatgttgatccatatgctgatatgagttacgtagatccagatgctccagcagcatgccaaatcattgtagacttcttgaatgaagagggctttaagattaccaaggaagttgcttacccactttatgctggaattgtaggcgataccggtcgtttcatgtatccagaaacttcagagcatacttttaaggtggctgctcaattagcttctactggaattaacattactgaaatcgctcgtaatattgctgatgtaacttttgatgaggcaaaattgcaagccttggcaatggacaagatggaaattgatcccgttggtgcagcttttacaattttgatgcagtcagacttgaagaagttaggtttgactgatgatcaagcaaatgttgctgtatctactccaggacgtattaaagatgtgcttgcttggaatgtttttgttgaaaaaccagatggtactttccgcgtacattaccgttcaaagggccctgtaatcaatgaattagctgctaagcatgatggtggtggtcatgcattagctagtggtgctaacgctaaggatatggacgaagtaaagcaggtatttgcggaagtcgttgaagtaactaagaagtttaaagaagatcatgaataatatttttatagattcaagaattaaaccagctattcaggctggtttaaagaagatccattttgaaaagccaactaaggtgcaggagaaagttattcctgctatgttgtctgacttgagtgtagtagtgcaagcagcaaccggttcaggaaaaacgcatgcttatttagtaccaatttttaatgaaattgaagaagataaacgctatgttcaagcaatcgttactttgcctagtcgtgaattagccgatcagctttatcaagtagcacggcagctccgtgatgcggcagggatgcatttttcaattgcacatcttgcgggcagaactgatcgtgaacgtcaattagaaaagtatcaaaataatactccacaattggtgattgcaactccaggacgtttgttagactttgttcaaaagaaggtttttgcagttgatcaagtaaaaacttttgttatcgacgaagctgacatgaccttggacatgggctttttgaacgacattgatcaagttgctgctaaattgccgaaggatgtccaaattgctgccttttcagcaactattccagttaaattgtctaactttttacgcaaatatatggctcatcctgatgatatcgttattgataatcctagtgttattgcgccaacgattaaaaacgatttgcttgatattggctcaaaggatcgcaagaatgtcttgtacaaattgttaactatgggacaaccatatttggcgttggtttttgctaacactaagcaaaaggttgatgagttgactaattatttgcaagatcagggtttgaaggtagctaaaattcacggtggggtaactgaacgtgaaagaaagcgtactctgcgtcaggttgagcaaggacagtatcaatatgtggtagctagtgacctagctgctcgtggcttagatattgatggtgttagtctggttgtcaattatgaaataccacgtgatattgagtttgtaattcaccggattggtagaactggccgtaatggtttgtcaggtcacgccattactttgattcgtgaagaagaaatgaaccggattgaagacctagaaaaaatgggtgttcattttgactttgttgagattaagaatggtgaattagtgccacgtaaacactatcgcagtcgtgaaaatcgtcaaagcaagaatcgtaagcttgataccaagctggtgggttacgttaaaaaagagaagagaaagcgtaagccaggttacaagaagaagattaagcgtgcgattcaagaggataatcgtcaaaaacgtaagttggaacagcgtcatgaggttcgtaaggcaaaacgtttgagaaagcgcaagcgtgaacaagggctttgacagaagcggattttgtagtacaattatttcagcttaagatatgttttttgatcaattatttcaaagagagagccagttagatgagaatggcttaataatagtcaaaaaatgctcctttaagtttcataattaagaatatcaagaggtaacaaacactgttgcaatcaaggtggtaccgcgcgtggagcgtccttgaagaaagcaatagtgttttttatttatttttagggagatttattttaatgaagaaactaaatagttcagagtttcgccaaatgtttttagacttcttcaaggatcatggtcacatgattatgccaagtgcatcattaatcccacaagatgacccaactcttctttggattaactcaggtgttgctaccatgaagaagtactttgatggctcagttgtaccaaaaaatcacagaattacttcatctcaaaagtcaatcagaaccaacgatattgaaaatgttggtaagactgcacgtcaccaaactttctttgaaatgcttggtaacttctcagttggtgactactttagagatgaagctattccttgggcatgggaattcttaactagtcctgattggcttggcttgccaaaggaaaagctttactgtactgtttatccaaaagatgaagactcatttaatgtttgggtaaaggcagggatgccagctgatcatattgttaagttggaagataacttctgggatattggtgaaggtccatgtggtcctgatactgaaatcttctacgaccgtggtcaagaaaacaacgacgttgctgaagacgatccagaaaacttccctggtggtgaaaatgcacgttaccttgaaatttggaacatcgtattttcacaatacaaccacttgccaaatggcaaatatgtagaccaaccacacaagaatatcgatactgggatgggactagaacgtgtgctttctattttgcaagatgcaccaaccaactttgaaaccgacttgttcttgccaattattcacgccactgaagaaatgactgatgacaagaagtacggcgttaacaaggaagacactactgctttcaagattatcgctgaccacgttcgtgccgtaagttttgcgattgctgatggtgcgcttccttcaaactcgggccgtggttatgttcttcgtcgtttgatccgtcgcgcagacttgaatggtcaacgcttaggaattaagggtgccttcctttacaagttggttccagttgttggaaaaatcatggaaagtcactacccagaagttatggatcaacgcggctttatcgaaaacgttatccaaaacgaagaagaaagatttcaatcaactcttgatactggtttgactttgcttgacgacttaatcgacaaggcaaagaattctaaggataagaccatttcaggtaaagatgccttcaagatgttcgatacttacggcttcccatatgaattgacttttgaatcagcacaagatgctggccttaaggttgacaagaagggctttgatgcagaaatggctgctcaaaaagagcgtgcacgtaaagctcgtggtgaccttcaatcaatgggacgtcaagatgtaactttaatgaacattaaggataagtcagtctttgaacgtgatacttacgaagaaccacatgcaaagctagttgacattgttgttgatgataagttggttgataaggccgatggcgaacatgctactttggtctttgacaagactccattttacgcagaacgtggtggtcaagttgccgaccacggtgacatttacaaccaagacggtgaattggttgccaaggttactgacgtacaacacgctcctaatgaccaaaacttgcactttgttgatttgattttgccagttgaaaagggtcaagaatacgtattgaagttagataaggaacgtcgtgaagggttacgtcactctcactcagcaactcaccttcttcacgctgctcttcgtcaagtcttaggtgaacacactcaccaagctggttcattagttgatcctgactacttaagatttgactttactgcaatggaaccaatgaccaagcgtgagcttaagaccgttgaagaattggttaaccaaaagatttgggaagctattcaagttaagactactatcactacccctgaagagggtgaaaagatgggtgctttagccctctttgatagcaagtacggtgataaggttcgtgttgttcaaatgggtgacttctcaagtgaattctgtggtggtactcacgtggacaatactaaccaaattggaatcttcaagattacttcagaatcagctgtcggtgctggtatgcgtagaattgaagctgtaacttctaagaaggcttatgaatacttggcaaaccgttcagacttacttgatgatattcaagaagaagttaaggcaaccaagccagataacattgtcgataagattgattcacttgaaagtgatttgcacgatgctcaaaagcaagttgaaactttgaacaagaagatcaatgctgctaaggctggtcaaatctttaatgacgttaaacaagctggtgacttgactgtcattgctgctactgcagatgttaacgggatgaatgacttgcgtgaacttgctgataactggaagagcggcaacaagtctgatgttttagttttagctgctgaaaatgctggcaaggctaatatgattattgctttagaccaaaaggcattagacaagggccttaaagcaggtaacttaatcaagatcgctgccccaatctttggaggtggcggtggcggccgtccaaacatggctcaagccggtggtaagaatccagcaggcttgaatgatgctattaaggcagttattgacgaaatttctaagaactaagaattaattaattgtgtttaagctttttttcaagtaaaattgttgacaggaggaataaatatgagttcgctagataagactatgcattttgactttaatcagaacaaaggaaaaaatgtttatgatactctgcaagatgtttacaatgcgcttgaagaaaagggctataatcctattaaccagattgtaggttacttactttctggcgatcctgcttatattccacggcataacgatgcccgtaatttgattcttaagcacgaacgtgacgagattattgaagaacttgttaagagttatcttggtaagaataaataatgcgtttattaggtttagatgtaggttctaaaactgtgggagtagcaattagcgatgagctaggaattactgcccagaagttggagactatccagattgatgaaagcagatataactttggtatgcgtccattgaagaagctagtcagacaatatgaagttgacggtttcgtattaggtttacctaagaatatggatggtacttctggtagttccgtagctagaagtaaggcatacggcaaacgactagaggaaaagtttggtttacctgtacattattctgatgagagattgacaacaattgaatcacgacgagtacttgttgaggatgcagggatccatgatcgcaagaagcgtaaacaagtaattgatcagatggcagcggtgctcatcttgcaaaattatttagatttacaccgaaaggattaaaatggcagcacaagttaatggtgacgatcaagatcgtcaaattactttgattgatgatcaaggtaatgaagaattgtatgagatattatttacttttcattcagatgattatgacaaatcttacgtgcttctttatccagccgctgttggcgatgatgaagatattgaggtgcaagctttcagttatgatgccgatgatgccggcgatgtaacaagtagcgatttgcatgagattgaatctgatgatgagtgggacatggtccagggagttttaaatactttcttagatgatgaccgcttgagtggtaaataataaaaagaggactggctgtggctggtcctttttgttagttttagaaaaaagataaaaatgaacaagaaaatattagagattttagaatttggcgaaattactaagcgcttgagtaaattagcgattactggtcccgctaaaaaagaagcggaggaattattacctagtggtgattttgaacaagtacaaaatgagttaaagcagactttagctttgactaatttgctacgaattgagggacaacttcctttaacggactttcaggacgtacgtccaagtactaaacgtttaagcatgaaagctaatctaaatgctaaggagttaggcaacttattattggtattaagtttagctcatgaaattaatgatttcttggcagaaatagatccaaataaattggatttgaccgcaatcgatgcaattttagatcaattagatgtgccagatctcttatttagagaattaaagaaatcagttgattatgatggcgaagtattagatacagcttcacatgagcttgctcgtttgcgtcatgatatacgttctaatgaagaggaaattaagaataagatggatgcttatactaagggcaatagtagtaagtatttatctgagcaaattgtgactattcgtgatgaccgctatgttattccagttaagcaagaatatcgggcaaaatttggtggggtagttcatgatcaaagtgccagtggtcaaacactgtttatagagccggaagccgttttaaaccttaataaccgccaacagaatttaattgctcaagaaaaacaagaaattcgtaatattttgaagcacttatctaatttggctcgtgaagaaattactagtttgaataatattgcggctgcattaactggactagatttcttgcaggctaaagccaagttagcaaaagaaatgaaggcaagtgagcctcgtctgacacaagaccattctttgaacttattaaaagcgcgtcacccattgattgacccagaaaaggtagtacctaatgacattcgtttaggtggtgaatttgatactatgctgatcacggggcctaacaccggtggtaagacaattaccttaaaaacagcaggattgcttcaattgatggcacagtctggattatttatcccggctgaagaaggtagcaaggttggcgtctttaagcaagtttatgctgatattggcgatgaacagtcaattgaacaatcgttaagtactttttcatcacatatcaatgacattattgcgatcatgaagaatgttgattctgagaccttagttttaattgatgaaattggtgcagggactgatccagaagagggtgctagtttggcaattagtatcttagactttttgcgtaaaaaagatgctaagatcatggtgacaacgcactatcctgaattgaagctttatggttataatcggccacggacgactaatgcctcaatggaatttgacttaaagaccttgtcgccaacttatcatttgcagattggtattcctggtcatagtaatgcctttgccattgcccgcaagctagggatgcgtgaagatgttgtcaaaaatgcccagaacttaatgtcagatgaagattctgatattaataagatgatcaccaagttgaatacgcaaaccaaggcagctactgtggctcgcaatcgtctgcaaaccagtttggatcggagccaaaaattggagcaaaagttgcaacaagcacttgattggtataaccaacgtgtacaaaaacagcttgattttgcacaagagcgagctaatgaagttgttgccaaacgccgtaaaaaagctgatgagattattgcccaacttgaaaaacaaaagaacatgggcgtcaaggaaaataagattattgaagctaaaggcgaactcaacagtttagagcgtcaggctaataatttggctcataataaggtattacagcgtgaaaaacgtcgtcaccatgtaagtgtaggcgatcgagtaaaggtcctctcatatggtcagacaggtacgattactaagaagttatctgaacatgaatatgaggttcagatgggaattatcaaagttaaggttagtgatcgcgatattgagaggattgaaaagggcgaaagtactaagcctagacaaactgttagagcaaccagtgcggttagaagaagtaatgctcatagcgagctggatttgcgaggccaacgctatgatgaagcaatgactaatttggaccgatatattgattctgttttactggcaggacttgatacggttacgattattcacggtattggtactggtgcgattagaaaaggtgtttggcaatatctccgcagcagcaatcatgtaaagaactttaattatgcaccagctaatgaaggtggcaatggtgcaacaattgtacaattaaagtaagcgtcttacttgcaaaaagtaagtataatagaatatacttataatataaataaatgaattgaaaaaatgtgaggtaataattatggttgaagcaattaatgatcaaaattttgaagaagaaactaagaatggtgtagcattagtagacttttgggcaacttggtgtggtccatgtaagatgcaatcaccagtaattgatcaattatctgaagaacgtcaagacgttaacttctacaagatggatgttgaccaaaatcaagatacagctaagaatttgggtattatggctattcctactttaatcgtaaagaaggatggcaatattgtagaccgaattactggttacactccaaaggaaaagttaaaccaaattttggatcaatatgctgattaatttaaaaatcaaaaaaagcttgagacgatgttgcctcaagcttttttgatatatcacttattttgatttacttgcttttttagcaagtcacgaatttcttctaaatagtcggcctcagttggaccagcttctttttctttcttgggcattactctatttaaagccttgatcattaaaaataccacaaatgaaatgatcaagaagttaatgacagaattgatgaagctgccatatttaaatgtagcatccccaaccttaaaaacgaggttagaaaaatcaattttgccggcaaagatcccaagtagggggttgatcaagttttttactaaagattgtacgatagcagtgaaggcagcaccgatgattacaccaactgccatgtccattacattgccacgtgaaataaactctttaaattctttaatcatgctctactcctatatctaatatatctaaaaaaatgcgattttaactaaagtatatagtagtggttatttatagtctatcaatttgcttttaaccgaagcgagcgataaattgaactttcttttctttatctaaaatattaatttcacattcggtggttcgactagttgatttttgaaatgcttccgcgatcattccgccttcaagagagaattccttgctggcgctattcaaacgatcagtgacagtttgaccacttaattcgtaagtagtaaatgatcgtctttctttaactttttctagcttaccaaattcagccatgttgaagaattcaactaaatcatcataatcacttaaatcatattttcgcgcgattctcttgccagcccaataaagaattgaggcgtcatcatcgcctaaaatagttggcaaaaggaaatcgcggtaaagttggttaataaaatatacgtgctcgtttgtgttttctgtgttttctgtcataaacttgttcatcccttttattcttttttattttaccgtaaactagtagaagtagaaaataaatttttgattttaagagggttttattatggataatcgtccgattggattattggattcagggctaggtggcctatctgttgcaaaaaaagtaattgaaaaattgcctaatgaatcaactgtttttattggtgataacgctcatatgccgtatggcgatcgaactaaagaagagattattgaactagttagaaaatcagtccaatttttgttagagaaaaatgttaagctgataatttttgcctgcaatactgcgacagcaatggctatgagtacgattcaagcagaaatcgatccacaaattatcggagttattcagtcgggaagtttggccgcttcacggacaactaagaataaaaaagttgcggtagtttcaactaaagcaacagcagaatcacatgcttatgctaaagagatccgtttccgtgatccagaaattcaggtaacggaattagctgcccctaaacttgcaccacttgtggaggctcaaaaagatcatgaaaccaacttaaaagtagttaaagagagtttgacccccttacaaggaaaagactttgacactttaattatgggctgtacgcattatccattgattcagaaagaatttaaagaagcaattaatgataaaaatgttactatcttggatcctgcagatcaagttgcacagtatacgtttaatgtgatgcggcgcgatggtttgtttagtgatggtaatgaaaaagtcagtcatgaatattacactacaggcgatccaactagttttgatcatttagcaaggacattcatggatgatgcaactttaacatctaagcatgtggatacggagaatgaataatggttaaagaaattttatttgcgactggtaatcaaggtaaagcaaaagaactaaaagaagcctttaaacaagctggggtaaatgtcgagattaagacgaatgctgacttagacaatccgcctcatccgattgaaagtggccatacgtttgaagctaatgccaagattaaggcccatgagttagctaactttagcaagttgccaacgattgcagatgattcgggcttaatagttgatgccttaaatggggagcctggtgttagaagtgcacggtatgcaggcgaagctcacaatgacgcaaagaacaacgccaagttattagctgaattaggcggtgtaccggatgaaaaaagaacggctaaattttggactacgattgtagtttcgatgccaggtgaatttgataaagacttggttgtgtcaggtacttgcagtggtcgtattttggccgccccatgtggtgaagatggttttggctatgatccattgttttatattccggaaaaagaaaaaacttttgcacagatgactactgatgaaaagaatgagctttctcatcgtggtaatgcagtgcgaaaattgctccaagaattgccagcttggttagaacaatttgattagataaataagcttcaaggtcataatgacttttgaagcttatttgatagttaaccaaaatatttgttagtgtaagttattaagaaattgtattagaaatggatgcatgggaattactaaaccaccaccaatgagcgtagttaatacaatttttttaacaaatttaaaaatcataatacaggagtcctttctatgaataaaaaagataacgtatatggacaaaaatataggaaattgcgagtactacatcatattagtttagtgaatgcagctaagaatgtaacaaataaatctacattagcagaatgggaaaaaggtaaagataatttatcttggtgtaaagtaatacaacttctttttaatattcatattcaaccaatagaatttttagaggatagtgtatcttcacaattgtacagtgcgataacaaatattgctgttgcatatcgaaggaatgatatgcaacaattgataataatttttaaagaaaatctgaaaaaatatgaaggagataccaaaagcaaagattatatgtttcaagctgctattgctgcaaatttttatgaagatttatcagagcataatgtatgtccttcaattttaaaagataaaattattttatatttttcaaatataattgataataaaaatttttggtgttatgaagatatattttattttgggttaattacgcagttattagatgcaagacatttacacggcttttctttgaaattattagaatatattgaaaagaaccctattgattctaaagtgtggaatgaattagcaataaacgctttattaaatgctgacttttctttaatgaaaaaagatttaaaaaaagccgaagaattatacaatagattggatatattggaagctatagataattatgctgaattaatcattcgtaagaaatttttagaaagcttgattcagtatttaaaaaataatagcaatgtagagatcttttttttatttcgttgcctagattttttagatttaactaatatgaaattagatttcgaatctgcattcctacaaattaaaaagatttataacaaatgatcatcttctttcagttgaattcattaggcatgatagcattttctaagatagcaaataaatcaatttccgataattcggaaatttatcatatagcagttaaagaaagagcaataataaatttgtaaaaactataaagaaaaatttaaaaagtgtgattattatgtttttacctaaaaagattatagtatcaagcttaatgatggctactttagttggatttagtagtttagcagtggataacgaatcagtatcggcaactagctatgataatggtacacaagaaaatattgaggaacttatcccaacagctcatcatttatttacagaagcggagataaatagtttttcagagctaataacagtaaaaaatggtgaataccaagtagatcaaaatagagcaaatcaggtaagtttaaggaaagtacagttggcaaatcaatttgtaagtcaggttaacgagactaaaagagatttaagattgtatggtgtagatttagcccatccacatcataattactttacgtataaggactttagttggggaactagatattatttttcaactaatgctgctgtaacacggatgcaaaaggttttaagaaatggtaatgcagttatgggtggcgcaagtatagtaggtggagccattggtggggtaattcctgcattagcaggttcagttgtagcaaatcacttttcaaatatggctgctgatttaggagactataataatgcacatagaaataaacaaatttatatggatgtaaattggacgggaggctattcatttcatatttggcattagtttggaggtgaagatatggcactaatatcaatagctgttttagcattaatagtgatgatcataacgtgtttgccagttactcagaggtatttttacaaatatcttgggaaaatcggatattggagtcttttgattatttttattatttatcttttaattgatatttggctctggttgagaagaccatataagaccgcagatttttggttaacatttagcagtatcaatattgcgggaattgttgctcttgttaaaacttattttgatattaaaaaattgaagtaaaaaataatcctattaaatcattaaaagtttgatttaataggattttattttgagttaaaagctaaaattttaagtgctgcttttggcaatagtttttgctggcaaactagtatctgcgaattcaatcttatttttttgcaaaatttcaatatatttacttagatacaaatttctcacagcagattgtttaccaggcttaacttgaaaatgaatggaataaacaaattttttccctgtttgttcggtcacaccgacaatagtaggacctgatacaattgtctttttctcaggctggatcttacgattgcattctttgattaacttgttaacttcatcaatatcgtttttggtatcaagatccaaattaatgtctagtgctacaccgccatgggctaggttttgcacaatggtaatgttgcggttagggatgaaaataattgagccatctgaacccttgagacgagtagttctgaggcctagttgcacgacggtaccaacattagtgccaatctgaactaaatctccaacatcaaattggtcttcacttagaataaagaaaccgttgaccaaatcactaacaaagccttgtgcgcccattcctaaagctagggaaaaaattccagcactggctaacaaggtgccaactggtacacctagaatagagagaataccgaataaatagaagaagataagggtatattgaaaaacgctgttgatcaaagcggtaatcgttcgcgttcgtttatttttaaccgtgttatgcttggctaagtaattattaattattttatgaccaaaatgggataaaaggtaaaaaatgagtgaagtaatagctaattgccaaataattgacaataaattttggctaattttactccaatcaatttcaattttctgtatatttatgtgagtaggaatcttcatttggtgtcctttctattgcttacgggtataattaagaataacaagacattaattgagaataaaggatattcatgctaaactttttttagatgttgatggaggtagaaaatgacaatttcttatggtgctttagcaggcttaattgcggcgattgcattcttaattttagtattatttacgattccaatgctaattcggaccgcgaagttgttgaaagaaactagtgcaactattcaaacaactaacgagtcaatgaagaaaatttctgaagatatggatggcttgatggatcaaacttcggatttgttagataaaactaatgacctaatgaccgatgttaatggtaaaatgaagacgttagatccagttgttaaagctgctgcagatttaggcgaaagcgtatcagaattaaacgattcatctaaaaagatcgctaaacgctttagcagcaatcatttaagccgtacgggtcttatttcttcaatagctgcgacggcatttgcaagacgcaagcgtcgcagaggtgaaaattaataaaggaggaattcaccatgaaaaaattcgcaagtttcttattaggtgccgttgcaggatgtgcagcaggttttctcgcaggttcacttcttgttagtgatgaacaagttgatgacgttaagaacaagattaaagataatgacaagcttcaagatttgaagaagaaatacgataatggtactgaaatcgtcaagaatcaattagcatcattccctaagaatgttgaagatgattcagaattgaaggattttgacgacatcgtaatcgatgactcaaataaagatgacgatgacagtgaaaatgctgaagagtcagttaacgatttgaacaatgctgaaaaagatgatactgatgcagcatctacttcagaaaaaccacaagcttaattaaagtcaaaaagaaaaggagctggtcgtgatacaatcccactaaagtggacgatttaaatacataaagtattcaattatccatggaggtgggattttttatgtccagaaaaagtaaatattcattcgatcaaaagatatgggcagttgaacaatacttgaatggtaataggagcagcgttgaaatagctaaacggcttaagatgccaagtaaaagtggagcgatgcaagtaagaagatgggttcatcaatatcaaagcaatcgtgatacccttctaagtaatgctcaatacaataatcattactctaaggcatttaaagaaaaggttgttcaagaatatttagctggcaaaatgtcgttaccttctttagctaataaatatggcattagaagcaatggaacagtatcagaatgggtttccaagtataatagtcatatagaaaatcgggactatgatccccatccggaggtctatatgactaaagcaagaagaaaaactacccagcaagaaagaattcagattgttcaatactgtcttaatcacgacaagaattacactcaaacagctgtcaaatttgattgttcttaccagcaggtttacagctggacacacaaatatctagctaatggtgaaacaggattaacagataaacgaggcagacataagaagccagaagagctaactgagttagaactggctaatcgaaaaattaaggaattagagcgtcagctcaaagaagaacaaactaagaacgaattcctaaaaaaattagatcagttagaaaggatgtgcttgccggacaaccaagatacagacaagccgcaataaaaagacgctggaaacaagaaacatatcagttaatccatgactgccatcaaaagtacaattggaagattgatttaatgtgcaaatgggctaaaatagcacgctcagcttattacaaatactttgatcctaagcgcaagccgagtaagcgtgaagaacgagacaaaaagattgaagcaaagatcattgaaataacccagtctaacaacagtctgtttgggacggaaaagatgaccatggcagttaatcgacagatgtctgatgaaaagccggtttatcataaaactgtttaccgcttgatgtgtatcaatggcattagatcacaaaagcctagataccagaagctaaagttcaagcatacaacgcctgagaaaacggccgaaaacaagttaaaaagagactttaatgcatctagacctaatgaaaaatggtgtacagatatcactgaagtcgttgctgctaacctgcctaaggcatatctatgtactgtgtttgatctatatgatcgctatcctgttggctacgcaattagtaaacgaaacgatactgctttagttcaagcagcctataagcaggctgttaaagcataccctaatgctcatccgcttttccatagtgatcgtggttttcaatttactcgcgcacctttccaaaaccaattagaagaccaaggcatgacgcaatcaatgtctcgtgttggctgctgtattgataatggtccaatggaaggctggcaaggcattatcaaagaaatgcgagttattcttcatcctcaagtggccagttatgatgaacttaatgattctatttgtaagacaatagattactacattaatgaagatccacagaaacgttttaacggtttaactgctggtgaaatgcgcaaagaagcgatgaaaggcaatattaagaattgccctattgcaccaaatcatcgaattgagaaatactggcaaaaaatacacgaaaagaaaataagagaagccaaaaaatcctcagctgattattaatcaactgaggaataaaagctttatgtaattctactgtctacttgacagggaatgtatcatcgtgatgatcagctccttttttatgacaaaattagtctttaagtggcaaaacttttaagtccttgtcagtgtgagtaaaggtttcaaagccgtccttagtaacgacaccacaatcttcaattctgacaccagcaaagccagggatgtagatacctggttcaatggagaagcacattccttcttcaagaactaagtcgttaccttgtacgattgatggatattcatgaacgtttttaccaatgccgtgacctaggcggtgaatgaagtattcaccatagccagccttagtaatgatgtcacgagccacgctatctaattcttcagcggtgattcctggcttagcagcttcgattgcggcttgttgagcttcacgatcaacttcataaatttcgcgttgcttagcagtaggttcaccgtaagcaacagttcgactagaatctgatgcgtaaccatcgtgcatggtacctaagtcgaataaaactaattcatttggttgaacagtgttcatagttggaccaaggtgaggattagcggcgtttttaccagcttgtacgatggtttcaaaactttcatgcataacacctttttgaatttttagttggtaatcaatttgtccagcgatgcttctttcggtgacgccagttctaattgcgtcaaagccaatcttaaaagcgaagtctgcttctgcaccagcgccttgcaacttcttgatttcttcaggtgtcttgtaaagacgaagtttttcaataaaaggtgaaacatcgttagtgaaactagcgttaggaaattcaccacgtaagagctggtagtgggcaacagacaaatcatctttttcaattgcccaattatgggtatcgtgagttctctttttgacattagttgcgatgatgttccaaggattttcggaatcaaggtagccaataacgtcgccatcccatgcggaagcttttgcttcttctacgtttaaagctggacagaaaataaatggttccgcatcttttaaaacaattaaagcaaagattctctcatgtggttccattgagtaaccagtaaagtaggaaatggtgattggattagaaatgtaagcaagatcattattggagtcttgcaaccattgttgtaatttatctaagttcatattgtcctcttttcttgcaaattatgttgactgtagtatatcatgatttcttaatgaaaaaatgaaagaaaatctgtaaacgtttgcattttatgcagcgtcgtgatatctttaagtgaagaattttttggaaggactgagagataagagatgcataaacaagaagttacaatctatgacgtcgctcgagaagctaaggtttcaatggctacggtttctcgtgttgtgaatggtaatagtaatgttagaaaagagacacgtgaccgtgttctcgaagttattaaaagactgcactatcaaccaaacgctgtagctcaaggtttagcttctaagcggactactacagtagggttaattgtcccagatttaactaatttatactttgcagaattatctaagggtattgatgatattgcacttttatataaatacaacatcattattactagtattgaaaaccgcttgatgaaggaagaccaagttattcaaagtttgctgaataagcaagttgacggtgtaatttatatgtctaaccgtttatcagatgcagcagctgatgcctttaagcggactgatactcctgtggttttagcaggtactaaagacaatcgtgatgattttgcttctgtcacaattgactataagaaggctgatactgaagcattaaatttgatgtaccatgatggtaagaagcatttgggaatcgtagttggtgatcaagatgctgtagttaacagcgaaaacagaatccctgcttatgaagaattcatggaagaaaatgatttgggcactcctcgaatctatactgatattaaagactattcagatggttataatttatacccacaattagttaaagatggcgttgatggtgtaattgttactcgcgatatttcatcagttggtattttgaattctgcgatggatgcaggtaagaaagtgccagaagatttggaaatcgtgaccgccagtgctacgcagttagcttctgttgttcgtccagctttgactacgattaagcagccactttatgatatgggtgccgtagcaatgagaatgttgactaagttgatgaacaatgaagaagtagatgatactcatattgttttgccatatgaattagttaaaaagcaaagtactttaaatcaataattaagtgaagcaaaaaagaccagtttactggtctttttgttttagtagataattttgttaatctgttgaagcttttgtgtaaaagtggttggtgcaattgcttgattaggattatagggcaaaagcacgagattagtgtactgactgacccgtggtaaggactgataatctatgaaatcgtcttgactaaagaagccatagaacaagatatcttttgccttaacccaacctagtttggtataaatccacatgtttttaggactaccattaaaattttgaatttttaataattgatttgcgggtaatttttgctgcgttttggcttggttatcaggataacgataaattgtaactttttggttaggtttagcgataattttcttattttgataaggagcaatatctcgctttgttaagtcaaaattaacgaattctgccgaaataaaagttttttcagcaatttgataaaataagcgatcatctacacggacgccataagtgacattgactttttgacctggttgcacgtacttcttttctttgatgcgaacatacggattcatcattgtagcggctttagttttaccaaaataaattccagttctattaatagcgtactttttagtgccacttttggctaatttatatttaaaaccagtagcgggatagttggtaaccacgccatcaacattccgattaattagccaatgccatagggcaggcgattcgtccatttcggcccagacaaacagttgcttatgtaatttgtgaagccagtgaattaaaaagggatgctcttgcacaatgtcagaagaagcattgatagcattaacttgaggtaaattactgaaattaatgcgtttcaggctaccaacgatcaaaattagataagcttcaggcataatttttctaaagtgaaagagactagcagcggaaaatgaatgaatcatgattcttttctgcatatggtattttttaactatttgtgcgattttatcctctaactcataggacggatttaatccatgatcaattttagtctctaagacaaatttagtgtttggtttattttgataatgcttaaaaagctcactgagtgacataacgtgttcgccattgtcatattgcagttgtttaagtgctgtaaaattattttgtgatacaattgcatgtgtatgagtaactcggaagaggtcatcatcatgtgcaatgaccggaactccatcctttgagagctggagatcgagttcaacgtaatcagcaccagaattaaaggcggaatcgtcagcctgaattgtttcttcaggatatttgatgggatcaccacggtgccctacaactgtaaaaccactatttatgaaaaagactaagctaaaaaaaagaacccaaacgagtcggcttttaaatttcatgtgtacacctctatcgcatacttaacaatagcatggttacacatttttttctatttatagtactattcttttatcagtaatcggtatgattgaaatctaaaggatgagatttaatggaacaattggacttaattgaagaagttaccagaaatgatggcagtcgatattatgaaatctctaatattgaccaaaatggaattgcagaattagctgcagatcatggcttaattaaaaaagtcaaaatactgcagctgaatattcctcgaactaaggcactgattgcttatgaaaaatatatcaatgatacttatgacttgcagactttgactaatgaaagtgattggaaaaatccaaaatgggtagaatgggataaacctaagggaaaaattttagacgcatataatatgatcttaaaagccaatcgaattggttagaaagtggcataaaaaatggaacaactgcgaattttacataccaatgatcttcattcacattttgaacatttccctaaaatcggacgttacttgaaaaaagcgcaggctgatcaatcggttgatggtatctacacttttgatgcaggagactttatggatcggtctcatcctttaactgatgctacggaaggtcaagccaacatcaaattgatgaatgggtttaactatgatgcaattacgattggcaataatgagggaatttctaatccacattgggtattggaacatttatttgatcatgcggactttccgacagttttagcaaatttgcgtgaagaagatgaatcaatgcctaaatgggcagtcggccatatgtttttaactactaagaaaaagacgcgaattgctttaattggcctgactgcagcttatccaatgacttatggtcctaatcattggcatgtcaagatgctaggtgacagtatggatcacgaattagctcaaattgaaggaaagtatgatgtcttaattttattgactcatgttggattaaaaatggatcgctggttagcgaaacattatcctcaaattaatttaattgtaggaggccacagccatgatctgattgaacatggtgaaaaagtggggcatacttggattacgcaaacaggtaaatggggaaactatgtgggtgatattcatctagaacttgaagatcatcacgtgattaaggtagtacctcgcactatttctactgcttcgatgccagaagaaccggaagataaggcagtgattcagggctactatgatgaaggtaagcgacttttatcagaacgaaaagtggctaatttacctgaaaaatttgcggatgataaagtagcagccgttcaagtttctcttgatgcgattgctgattttgctaaaacagatttagccattttaagctcaggcctattcttgaccccgtttaagagtggaataattactcaatatgatttacaaaatgccttaccgcatccaatgcacgttgttcgttcaaccttgaaaggttatgatttgtggcgactagtgatggaaattgaaaagaatcggcattacctagaccattttccactgcaagggatgagttttcgaggaaaaatttttggtcagatgtattacaaagggatcaaggttgatatgcgtagacgtgtagtttacgtcaatgggcatgaaattgatccacaaaaagaatataaaattgcctgtttggatcattatgtcttagttccatttttcccaactttggctattgtcggtgaaaatgagtttttattcccacaatttttacgtgaagttgttggtaaatatttggctgaaaaatatcctttaacagcgagaagtgaaaaagatgactgaagaaaataaatttgaacaagaacagccaattagacacccacttgctgacgtggggcaagatggtaagagcattaagattggtgcgcagctttatagcatcattgtcaatgagcgagacgcacttgatttagaatctttgcgtaaaaaatatgatccttatcttgaccagtatgattatctggtgggggacgtttctagtgaacatttacgcttgaaaggcttttataaagacggtgctagaaccgcaattgataaaaaagaaatggcgatcgtggattatttaacggaatattgtaatcccggcggaccttattttatcttggaattaacgcatccagtacattattatcagcatcaacgtactaaaatacggcgatcacgtgaacgacgcgagcgcgattttggtaaaaatgagcgttatcatgcacgacgtcgaaattatcggaagaataaaaatgaaaataatccgtttaagaagcggcgtgttcatcaaactaaatttaagaaaaaacaatcaattgcagtgaaaaaagaatttggacggcatcattcatttattattaaaaagagaaagggaaactagtgaaagattaccgggtatttttaattgacttagacggaactgtttatcgtggtaaggaaacagttgaatcaggagtaagatttgttcatcgtttggttcaagcagggaaagactatttgtttttaaccaacaatacgaccagaacaccgcaaatggtagttgataaactaaagggacacggtatcgaaactgatacggaccatgtttatacgccaagtatggccacagctagctatattttacaaagagaacacaaggaaaagatcggcttgtatattattgggcagattggtctctggcgtgaattattgcaacatccagagtttgagcttaatgaagaaaatcccgattatgtaattgtcggtatggatacagatctgacttatcataaagtacgagtagcttcacgggcgattagacgtggagccacttttattgggactaatgccgatatgaatttaccagcagaggatgagctaattccaggcaatggttcacaatgtgcattcgttgctgcagcaagtggagtagagccactgtatattggtaagcctgaatcaattattgtaaaaatggctttggataaagttggctatagcaaagatgaggcacttttggtaggtgataattacgataccgatattaaagctggctttaatagtggagtagatcagttgttgactttgacaggtgtgacgaccaaagtggatattgcagataaacgtcaaccaacaattttagttaataacctagatgaatttgaattatgattactaaaaacaatattttttcgctgatttatcattttttgtttgctgtttctagcagtgtaattggggcaattgtggctagttggccattattgtttatttttatgatcgtacaaaagacatatgagacggttcacatgtctttgtttaaggtaatgcataattataaccagctgatgttttatttgctctggccctttaaaaagcagcttaaaatggataatttccctacatctgctaatgcggcagaacattttgcggaatgtaagcatttatttattctgactctattagtttttattatctgcatcatagtgcactttgtttttaaacgacaaaagaaaaagctactgcttaatttggataaatcagtagcccttattttgctattattgccaattattatttttccatttgcagtaaccaatttcgacagtttctttgtgatttttcaccatattttgtttaacaatagtgattggctgtttgatcctaatactgacccaattatcaatgtgctaacggaaggcttctttgcttcttgttttgccgttgctggggttatttatgaattatattttgctgaaaaattattacgtaagtaaaaaagagttccttagtggaactcttttttgagtgatatttttttcttgattgcgacaattgcgattggcacaactgatactaaaatgatagcaattacgatcattgaaaaatggtcctttacaaatggaatattgccaaagaagaaaccgatgattgtgaacaatcctgtccaaagcaagccacccaagatgttgtaggtgataaatttaccataatgcatcttactgccgccggaaatgaatgggacaaaagtacgaataaatggtataaatctacctataacgatcgtaattggtccgtggcgctcaaagaacttttcagcggccaaccgattattttgattaattaatttattgaaccagctatgtttttcaccagctctggttgaccaggcaccaatttcatagttgatactgtcaccgattatggcggcgaatgctactataagataaactagccaaatatttaagccatacttaggattagcagccattgcactcgcagcaaaaatcaacgaatcgcctggaagaaatggaaaaacgactaagcctgtttcaataaaaatgatagcgaataagattaaataggaccaaccaccgaattggttaacaatcgtgattaaatggtcatcaatgtgcaaaataaaatcgattaaactcatctggaactcctaaaaactagttgaatgaattgtcaaagttttttcagggaaaagatcacgcataatcgcggtgattgcaatctgggcttcgccaaaaccgagagcgattaaagggacgcgtccaggataggtaacaacatcgccagctgcataaacaccggcgatattagtttgcattgttgaattcaccttaatttgtgcgccagctaaatcgattccccattttttgacaaagcgattattagctttaaagccatatgcaacgactgcttggtctaacttgatattagttaaactatcttttcccatttcttttaaattaacgttcagttgattatcaaccaaattgatttgtttaggaagatagggagttaaaatttcaacattttttaaagacttaagttttttgacattagattcaagaccgcgaaattgattacggcgatgaatgattttgacattggcataattagctaattctagtgccaggtctaatgctgaatcgccgccaccaaagacgccaactgtttgtccgacaaatttttggggatctttaataaagtaatgaatccttttttgagtatcatcatccatagataatggtaaagctttaggtttaaaggcaccggcaccagtggtaatcaatatgctgcgggatgcaactatatcatcgataataaagccgtctttttgtttagtgacattttcaactttatggttagtaaaaatagttgtatccgttaaattatgtcgtaaattgtcgattagttcagttcctgtaatagagtcgtaagcaggaatatctttgattttcttaaaaggataaagcatttgtggctgtccgcctgtttcagataatgaatcaaacagtacggtcttgagtccatgaagatgggcaaatcgcgcggcaaataggccaacaggtccgccaccgataatagttaaatcaaattttttaattttaatgacctcctcaaagtagtgatgtatcaactttaacatgaattttgtaaatattcatttaaaaataagcttgtcaaaaaatgaattttaaggtatattattgaagtcgcctttttaagagcgagcataattctttattaaaaaatacttgcaattaatattcaagtattatatattaataaagtcgcttcgagagatgcgacgagagcttaaaaacagacatgcaaggaaagaaaacaaataaaaagaaaaaaagtacttgcaaagaagtaaataagctggtaatatatttaaatgtcgtcaggtgaaagcagaaaaagcttgagcaagacgaaaaaaacaaatcaaaaaagttcttgacaaagaaatgatggtttgataaaatataaaagctgtctgttttgcaaaaaagcaagacagaggtagtactttgaaaactgaacaaagtttcgctaaaagtgtgcgggtgtaaaaacccaaacaagaagcgaagtcaattcgcaagcaataaatttgagacaaagatcttaaataaggaatgagcaatcattcaaactttttaaaatgagagtttgatcctggctcaggacgaacgctggcggcgtgcctaatacatgcaagtcgagcgagcggaactaacagatttacttcggtaatgacgttaggaaagcgagcggcggatgggtgagtaacacgtggggaacctgccccatagtctgggataccacttggaaacaggtgctaataccggataagaaagcagatcgcatgatcagcttttaaaaggcggcgtaagctgtcgctatgggatggccccgcggtgcattagctagttggtaaggtaaaggcttaccaaggcgatgatgcatagccgagttgagagactgatcggccacattgggactgagacacggcccaaactcctacgggaggcagcagtagggaatcttccacaatggacgcaagtctgatggagcaacgccgcgtgagtgaagaaggttttcggatcgtaaagctctgttgttggtgaagaaggatagaggtagtaactggcctttatttgacggtaatcaaccagaaagtcacggctaactacgtgccagcagccgcggtaatacgtaggtggcaagcgttgcccggatttattgggcgtaaagcgagcgcaggcggaagaataagtctgatgtgaaagccctcggcttaaccgaggaactgcatcggaaactgtttttcttgagtgcagaagaggagagtggaactccatgtgtagcggtggaatgcgtagatatatggaagaacaccagtggcgaaggcggctctctggtctgcaactgacgctgaggctcgaaagcatgggtagcgaacaggattagataccctggtagtccatgccgtaaacgatgagtgctaagtgttgggaggtttccgcctctcagtgctgcagctaacgcattaagcactccgcctggggagtacgaccgcaaggttgaaactcaaaggaattgacgggggcccgcacaagcggtggagcatgtggtttaattcgaagcaacgcgaagaaccttaccaggtcttgacatctagtgccatttgtagagatacaaagttcccttcggggacgctaagacaggtggtgcatggctgtcgtcagctcgtgtcgtgagatgttgggttaagtcccgcaacgagcgcaacccttgttattagttgccagcattaagttgggcactctaatgagactgccggtgacaaaccggaggaaggtggggatgacgtcaagtcatcatgccccttatgacctgggctacacacgtgctacaatgggcagtacaacgagaagcgagcctgcgaaggcaagcgaatctctgaaagctgttctcagttcggactgcagtctgcaactcgactgcacgaagctggaatcgctagtaatcgcggatcagcacgccgcggtgaatacgttcccgggccttgtacacaccgcccgtcacaccatgggagtctgcaatgcccaaagccggtggcctaaccttcgggaaggagccgtctaaggcagggcagatgactggggtgaagtcgtaacaaggtagccgtaggagaacctgcggctggatcacctcctttctaaggaagcgaaggatatggagagcaggaatgctaagagaagtatccagagcaagcggaagcacactgagaaactttgtttagttttgagggtagtacctcaaaaagagctagtacattgaaaactgaatataatccaagcaaaaaaccgagacaatcaaagagaacagattgtagagcgaccgagaagagaattcttgagtaaggtcaagtagaaaagggcgcacggtgaatgcctaggcactaacagccgaagaaggacgtgacgaactacgaaaagcttcggggagcggtaagtacgcagtgatccggagatatccgaatgggggaacccaatgcagagatgcattattgattagtgaatagatagctaatcaaaggaagacgcagtgaactgaaacatctaagtagctgcaggaagagaaagaaagatcgatttccttagtagcggcgagcgaagaggaaagagcccaaaccaagtgatttatcatttggggttgtaggactgcgacgtggcagtgtaagagatagttgaattatctgggaaggtaagccagagagggtgagagccccgtaagcgaaatctcaagcacgcctagcagaatcctgagtaggccgggacacgaggaatcccggttgaaaccgcgaggaccatctcgcaaggctaaatactagttagtgaccgatagtgaaccagtaccgtgagggaaaggtgaaaagaaccccggaaggggagtgaaaaagaacctgaaaccgtgtgtctacaagtagtcaaagcacattaaagtgcaatggcgtgccttttgtagaatgaaccggcgagttacgttatctagcgaggttaagtcagaaaagacggagccggagcgaaagcgagtcttaatagggcgaaaagttaggtgacgtagacccgaaaccaagtgacctacccatgaccaggctgaaggtgtggtaaaacgcactggagggccgaacccacgtaagttaaaaattgcggggatgagttgtgggtagcggtgaaattccaaacgaacttggagatagctggttctctccgaaatagctttagggctagcctcgtggagaggataatggaggtagagctctgtttggactaggggcccgtcaggggttactgaatccagataaactacgaattccagatatccatacacgggagtcagactgcgagtgataagatccgtagtcgaaagggaaacagcccagatcaccagttaaggtccccaaatctatgctaagtggaaaaggatgtggagttgcgtagacaactaggacgttggctcagaagcagccatcattcaaagagtgcgtaatagctcactagtcgagtggcgctgcgccgaaaatttaccggggctaagcatagtaccgaaactgtggatgtgttttaaagagcacgtggtaggagagcgttctaagagcggagaagttgaatcgagaggatcaatggagcgcttagaagtgagaatgccggtatgagtagcgaaagataggtgagaatcctatccgccgaaagactaaggtttcctggggcaggctcgtccgcccagggtaagtcgggacctaaggcaaggccgagaggcgtagtcgatggataacaggtagagattcctgtactgtgtcaaatcgttaagagcgaaggagggacgcaggaggtgaagcacgcatcgcgatggaacgatgttcaagcaacaagtgcggttaagagtcaaatgcttctaaccagcaacacgagttgtgaagaggagtgaattaaaagtagcgaaggtgtggtaatcacactgccaagaaaagcttctagccagagatgacatacccgtaccgcaaaccgacacaggtagtcgagtggagaacactaaggtgagcgagagaactctcgttaaggaactcggcaaaatgaccccgtaacttcggaagaaggggtgctagccaagagattggttagccgcagtgaataggcccaaacaactgtttatcaaaaacacaggtctctgcaaaatcgtaagatgacgtatagaggctgacacctgcccggtgctggaaggttaagaggagagcttagcgtaagcgaaggtttgaattgaagccccagtaaacggcggccgtaactataacggtcctaaggtagcgaaattccttgtcgggtaagttccgacctgcacgaaaggtgtaatgatttgggcactgtctcaacgagagactcggtgaaattataatacccgtgaagatgcgggttacccgcgacaggacggaaagaccccatggagcttcactgtagcttgatattgagtatcttttaaacatgtacaggataggtaggagccagagaagataggacgctagtcttattggaggcaatgttgggatactacccttgtttgaaggatgctctaacctcgacctgtaagccaggccagggacagtgtcaggtgggcagtttgactggggcggtcgcctcctaaagtgtaacggaggcgctcaaaggttccctcagaatggttggaaatcattcgcagagtgtaaaggtataagggagcttgactgcgagagagacaactcgagcaggtaggaaactaggacttagtgatctggtggtaccgtatggaagggccatcactcaacggataaaagctaccctggggataacaggcttatctcccccaagagttcacatcgacggggaggtttggcacctcgatgtcggctcgtcgcatcctggggctgaagtcggtcccaagggttgggctgttcgcccattaaagcggcacgcgagctgggttcagaacgtcgtgagacagttcggtccctatccgtcgtgggcgtaggaaatttgagaggagctgtccttagtacgagaggaccgggatggacgcaccgctggtgtaccagttgttccgccaggagcatcgctgggtagctatgtgcggaagggataagcgctgaaagcatctaagtgcgaagcccccctcaagatgagatttcctttgcgtaagcagtaagacacctcagagacgatgaggtagataggctgggagtggaagtcctgtgaaggatggagcggaccagtactaatcagtcgaggacttgaccaaagcgaagcaaactggaaggttttttgcgagaaggattatgtttagttttgagtgtaaaagctcaaaagagtacggtggcgaaagcaagaaggatacacctgttcccatgccgaacacagaagttaagcttcttaacgccgaaagtagttggtgggcaactgcctgcgaggaaaggaagctgccgtgctcaatatggaggattagctcagctgggagagcatctgccttacaagcaggaggtcacaggttcgagccctgtatcctccatatcgagtcgttagctcagttggtagagcaacggacttttaatccgtgggtcgagggttcaagtccctcacggctcatgaccttatatatgcgggtgtggcggaattggcagacgcgctagatttaggttctagtgttttcggacgtatgggttcaagtcccaccacccgtattgccaaccacatattgacaatatgccgatttagctcagttggtagagcatctgtcttgtaaacagggggtcgtacgttcaagtcgtataatcggcatttatattacgcggaagtagttcagtggtagaacatcaccttgccatggtgggggtcgcgggttcgaatcccgtcttccgctttcatcaacacgccggagtggcggaattggtagacgcacgggacttaaaatcccgcggttggtttcaaccgtatcggttcgactccgatccccggcattgatgatgcgcccttagcgcaactggatagagtgtctgactacgaatcagaaggttgaaggttcaaatccttcagggcgcatataacgggaaatggctcagtttggtagagcacctggtttgggaccagggggtcgcaggttcgaatcctgttttcccgattgtaatctaatggtgattggttacattttggcggtgtagctcagctggctagagcgtccggttcatacccgggaggtcgagggttcgatcccccccgccgctataattgtaagcttggacctttagctcagttggttagagcagacggctcataaccgtcctgtcgtaggttcgagtcctacaaggtccataatatggcttttatattaatatggcttttatattaatatcgcgggatggagcagtctggtagctcgtcgggctcataacccgaaggtcgttggttcaaatccagctcccgcaatttggtccattggagcagtggtttatctcgcctccctgtcacggaggagatcatgggttcaaatcccatatggaccgtaagatggctcggtagctcagtcggtagagcaaaggattgaagctccttgtgtcggcggttcgattccgtcccgcgccatttcattttatattaggtgcgggtatagtttagtggtaaaacgaaagccttccaagctttagtcgcgagtccgattctcgttacccgctttatatgggcctatagctcagctggtttagagcgcacgcctgataagcgtgaggtcgatggttcaagtccatttaggcccattggagacatactcaagtggctgaagaggcgcccctgctaagggtgtagatcgggttattccggtgcgagggttcgaatctctctgtctccgctatatagaaaagtaactgttctagattaatttctagagcagtttttttgtgtaccgagcggcattcttagtccgatgaaagtgttagaactaagagccagtagcaatgatattatgagtatgggacgtttacaaaggagtaaatacctgctgaaacagtaaggaattacaaatgtatcgtcttatatgcaaccatatgtatagtggatggaaggagatgagttcgttaagttctctctgcattgaaaacacgtcataagatgttaaaaccttaattttgagttattgataaacctaaatgcatattattttgaatgacttaatggaaattattacacttcttttaggtaaaagtcttggacattgattcaagtcaataatcgtgtatataacatagggagagccgattgttttaaatttcttcttgtatgatctatattaaaaaaataattttgtgggggatttcatagtgatataaagaagcagtttaatatggaacaatttataaagatcatttagttaaagataagagaagctgttttgctctagctaatttgaagtattaagatagatataaatgttttacaacaaaaaaataaaaaagtacttgcattttgactgaatatctattaatattaaatacgttgtgattgagagatcacaatagtaatagctaattaaaaaaataaataaaaagttcttgacttttgaaatgtgattagttattataataaagtgctcttgagtgagttacatgacccgttggtcaagtggttaagacacggccctttcacggccataacatgggttcaaatcccgtacgggtcattgccacaatttatttttttggcattaagcaatggaggattacccaagtggcttaaggggacggttttgaaaaccgttaggcggttctgccgcgcgtgggttcaaatcccacatcctccttagttgaatatcgcgggatggagcagtctggtagctcgtcgggctcataacccgaaggtcgttggttcaaatccagctcccgcaatttggtccattggagcagtggtttatctcgcctccctgtcacggaggaaatcatgggttcaaatcccatatggaccgtaagatggctcggtagctcagttggtagagcaaaggattgaagctccttgtgtcggcggttcgattccgtcccgcgccatcatctggaggagtagcgaagtggctaaacgcggcggtctgtaaaaccgctctctctgagttcggcggttcgaatccaccctcctccataatagggatatcgtataaaggtagtacatcggtctccaaaaccgctagtgtgggttcaattcctactatccctgtttaccttcatggcggaattggtgaaggggttaacacactggtttgtggatccagcatgcgtgggttcgattcccacattccgccctagtattgggatatagccaagtggtaaggcattagactttgactctaacatgcgctggttcgaatccagctatcccaattctaaataatttcataacttatggcggtgtagccaagtggtaaggcagaggtctgcaaaaccttaatcgtcggttcaaatccgacctccgccttatcaaccgaataagttgattattttaaaatttaatattatggcggtgtggcggaattggcagacgcgtcagactcaaaatctggtgtccattacggacgtatcggttcgaccccgatcaccgctattattatgaagcgatccaattattggatcgctttttttttattttaaaatgttagcattttattatataaattgcacatgaatacaggaatctttataatgctacatatggaggtactcaaatgaatattggtctttataccgatacatattttccccagataagtggcgtagctacttcaattaaaacgttaaaagaagcgttggaaaagcaggggcataatgtatttatttttactactactgatccgaacgtgaaaaaaggaactgtagaaccgaatgtatttcgttttagcagtattccttttgtctcatttaccgatcggcgaatagcatttagaggactatttgaagcaaccaaagtagctaaagaagtcaatcttgatatagttcatactcaaactgaatttgcattaggtactattggcaaatatgtagctcatcaattagatattcctgctatccacacttaccatacgatgtatgaagattacttgcactatattttaaatgggcatttgcttcgtccatatcatgttagacaatttgttaaaagctatttgaaaaatatggatggatgtattgctcctagtggccgagttgaagaattattacggcgctatggcgttcaaataccaattagggtgattcctactggagtagatttgcagggcatgaacaacgatattcaacgtgatgtgcggcaagaacttggaattgatcaagatgcgcctgtaattttaaccttaagtagaattgcagccgaaaaaaagattaatcatattttgaacgtaatgcctgaaattattgatgaatttcctaatgtgaaatttgttatcgcaggtgatggccctgatgttgatgtgttaaaggatcaggtagagcgattaacactagagaattacgttatttttgtcggtaatgtagagcatggcgatgttggtaattattatcgaatggctgatctttttgtttcagctagtgatacagaaacacaggggttgacttatattgaggctctagctgcaggtacgccatgtgtggtttatgacacagactataccgaaaacatttttgatcaagatatttttgggcagacatttactacacaacaagaaatgttagaagagattattactttgcttaagcaagggacgaaaagaatcccgcaggaacttttgcaaaataaattacagaagatttcagctgatcaatttgctaaaaatgtgtctgatttttatcagtatgcaattgatcactatcaacctaagcatgatgaggagactaaaaagaggaactaaatgattagaattaatatgttctcgcaagctgattctgttaaaggacagggtgtaggttcagcttataatgaattgattaaacttcttaggacgcacttagtagacgaattttatgtaacgattaacaaatatggcaatagcgatttaacgcattatcacacgattaatccaacctattacgcaaatagtttttcaccagcacgtggcaggaagattggctatgttcactttttaccagatacattagaaggctcaattaagttgccaggcgtagctaaaaaagttttttatcaatatgtaattgatttttataaacgcatggatcaaattgttgtagttaatccaatctttattgataagttggttaactatggaattgatcggaacaaggttagatatattcctaattttgtttcaaaaacagaattttatgaagaatcattggccagcaaaaacgcatttcgtcatgaattaggaattccacttgataaatttgttgtttttggtgatggtcaagtacaggaacgcaaggggatcgatgactttgttaagatggcacaagctaatcctgatattcaatttatctgggcaggcggtttttcgtttggcaaaatcactgatggctatgatcattacaaagaaatggttgacaatccacctaagaatatgacgtttgcgggaattgtagagcgagagaagttagttaagtatttaaatattgcagacttatttgttcttccatcatatgatgaattgttcccaatgtcagttttggaagcattcagttgtggaacaccagtattattgcgtgaccttgatctttataaggcaattatcgatggctattatctaagcgggaaagattttggcgaaatgaatcaagtattgcaaaaagtagttgccaatccacaaactttgcagaaatacagcgaattatcgcgtaaggcaagtcaacagtattcagaagatcatttagctaaaatttgggacgaattttatcatgagcaatatgaattaggaaaagagctaggtcaaatacattaatgaataaaaaacatttgtggggcattctggttgttttagcaatcagtgcctttgtgctatatgcagatttaaaagctacaccgatatcggaaatattacgggcagatcatggcctgaatatttttgcattaatcatggtttttgctttaatgcttttgtcctatgtatgtgaagccggtatcttagctactttagctcatcgaaagaaagagcctaaaaggtcagcttggtcgtttttgcgaattccaattattcaagctctatttaatgcaattacaccaatgtccacgggtggacaaccatcacagctagccgcaatgattcaaatgggcatggaaggtggccgttccacctcaattttgctgatgaaatttattatttatcagatcgttgttttgtttgcctatgtatttacaattatttttggctttcacatggtaatgactaagttcgctggtttagcaatttttattgcaattggctttttgattcatgttagttcaattatctttttgctggcaattatgtttgcttatcgttttactaaaaaggcaactaattggttaatggacttgttggcaaaaatgatgaaaaaggaacgagttgagaagtggcgtaaggctactttagaaaagattgatactttttatgcagagagtcagaaactaaaaaaagaaaagaagaaattatttgttgcctcgcttttaacagtattgcagctacttttcttttactccgttccatttatggtattaacagcgctaaatgtaccttgttcttggtatcaagttacgcaaatgaatataatgattatcatgtttatggcgatcattcctattccaggtgcgtcaggaggggcagaatatagtttccaaacgttattctccaccttcatttcttcacatggtgcgttaattttggctatgtttatttggcgcttttcaacatattttttcggtatgcttctcggcatcttaggctggatttttgaaactgtcaaatcttttgtgtaaatagatctttctcgtaaattgattttttaattatttatttaatcaaagtaggattctaaggtgtcctgaacctgaccaaagcctttatgaattcgattgaaataacggtcattgtagctcattgcctgaatgccaataaaagcatcaagcgactgttcagttggaaactctgccttaggcttagctttgcgcttgatcacattgttaaatgattcaatcatgttagtcgaataaattgaagctctgatctgcttgggatagttataaaagaccagcagatctggttctatgtctttcaagcttctgataacatggctgtaaaccttgccccatttggtatagaagtcatgcaggacagctgtggcttcttctttgtttgtctgttgatgcacctgtttgaattcgttcatgatcttttcacgatcgtcgacgcgtactttagcgcagatattgcgcatgacatgaaccaaacagcgttgaaaatgagctttaggataagtcctggccaaggctgttttcatgccaacaacaccatcagaaagaaaaagctcaacttgctttaagcctcgggatttcatgttttgaagcatatctgtccagacttcaatgttctcgctaggtgcaatgcagtagtcaatgacctccttgtgcccattaggcttgatgccaatggcaatatagactgcttcacgctcaaatgtttctcggcgcaaaggaaggtatgtcgcatccaaatagacgcagaaaaacttgtcgcttagcttgcgtttgtggtaagcctcaacatttggaatcatctgcttggaaatatttgatacctgagctggactgtaatggctgccatacatcttttcaattagatcggctatttccctggtggtcacgcccttggagtaaagcttgataatcatgctttccaagatatccgagtgctgcttgtagtcaggcagcgtgtgctgatgaaattgaccgttgcgatcccggggcacttgcacttcaattgggccaaattgcgtatcaactttgcggaaataagcaccatttctagagttgccagtattccagccatttctggcatagggatcatagcccagaaaggcagtcaattcagcttctaacaagttattaacagcctgttgtagctctttgcgcaataaatcatttattttgtctggattgaatagagcttgagcaaaatctttggtaaaatcattcatgaaggagttcttctttctgtatgtgtttttttgttcaaaccaatcatacgagaaaggaactcctttttctaatgtttaaagaaataaatttaaggaatcattcatccttacacaaactattttacagtctcggatttttaagccgaaaaagataaaaagcacaaaaaatgattaatttttattaaaacaacggtgtcttactaaatttcgtagtaagataaattaccgtaatgagaggagcagaagcgcgtggaacacactaaatctttttttaggtggctgacacagactaagttaggcttttttacgattgttttagtcttgttttggcttaaaacttattttatctatttaactaagtttaatttaggagcagttggtccaatgcagcaatttttattgctgattaatccgattccttcagggatgcttttgctgggaattgggctattttttaaaggacgtaaatcctattggattattttagttatcgattttttgctaacactgtggttatttgccaatattttatattatcgcgaattttcaaactttttgtcattttcaattattaagacatcaggctcgacttccgataatttgggtaaaagtattgcaggaattacactagctagcgattttttagcttttgctgatattgctgtaattatcgtgttattggcgaccaaagtaattaagatggatgttcgtccactgaagctaaaagttaatttgttaattgaggctttggctgtcagcttaatgggactgaatttattgatggcccaaaatgatcgttctggacttttgacgagaacttttgataataattacatcgtcaaatatctgggaatcaatgaatacgctatttatgatggctataagacagcacaaactagtgcacagatggccaaagctaatgtttctgatttgaagtctgttagaaactatttaaaagaaaattacgttaaacctaatcccgcttacaccggcgtggctaaaggaaaaaatgtgttaatcatccatttggaaagttttcaacaatttctgattggctacaaatggaaaggtaaagaggtaacgccaaatctgaataagatttatcatcaaaaagagaccattagttttgataatttctttaatcaagtaggacaaggcaagacttctgatgccgaaatgatgcttgaaaattctttatacggactacaatcaggtagtgcaatgtctacgtatggtacttctaatacttttgaaagtgctccagccattttgcatcaacaagctggttatactactgctgtaatgcatggtggtgctggctccttctggaatagaaataatgcttataagtcatttggctaccaatactttatgccactgtctttctatcagaacaaaccaagctactatatcggatatggcttaaaagataaaattttctttgatcagtcaatcaagtacattgagcgtttaccacaaccattttatttaaagatgattactgtaacgaaccactatccgtataatatcgataaaaagaatcagacgattgataaaacgaatactggggatgaaacagttgatggttatgtgcagaccgcgcattatttagaccaagcaattggtgaatttatgcgttggatgaagaagacgggcctagataagaagacactagtagtattttatggtgatcactatgggatttcaggtaatcaccataaggctagtgcagaattgcttaagaaagattcgtttaatgactttgataatttgcagttccagcgagttcctttgatgttccatatgaaaggactaaagggtggcattaatcacacctacggcggtgaaatcgatgttttaccaaccttactgaacttgctggggatcaaagacaaagatacgatccaatttggctatgacttgctaagcaaaaatgcaccgcaaattgtagcacaaagaaatggtgactttatcactccggaatattctaaggtgggtagcgattattatgacaccaagacgggcgaaaggatcaaacctaataagaaattaaaagaaaaattaactgcaatttctaacaccgtaactacacagctgtctttgtcagatcgtgtaattaatggcaatctgctccgattctataaaccaaaagggtttactagagtcaagccgaaggattacgactataacaaggcgccatctttaaaacgtttgtttgatgatccaagcaaaacttcactgtggtatcaaaatcatcgtaaaacgacgcaaaaagatttcaagacagatgcgcctgaactaaaaaaataactgcaaaaactagtaatttgtgataaacttggtaagtaaatcgtatgtgtgtattggaggcagcgcattgtataatttagttatgacgctactaatcattgtttcaatcttaattgtcattgcaacaatgatgcagccacaaaaacaacaagatgcattgaacgccttatctggcggtgccgtttttagtgggcaaaccaaaaaacgtggttttgaagcatttatggaaaaagtaacctcagttttattggtactctttttcgtctttgctattatcttagcttatatgtcttcaaaataaattttgtacctcccgatcaaaatatgatggggaggctttttttattaaatttaaagatcggagaataactgcatggcacaaaacgaaaaaattttggccggcgttttagaaatttttcgccataatccacaaaaacaatttcgtgtagatcaaattgaacgtgaagcacgtcgtgatagattaggtaattttactgaattaattaaggctctttcttttttagagcacgataaaaagattattacagatggcaaaggacaataccaattagctcaagaaaatactgaagttgaaggtgaatttagagctaatgataaaggctttggctttgttagattagatgatgaaaatgcggacgacgtctttgttgccgcagattataccaagtatgccgttaatggtgaccgagtaaaagtaaagatcactgctggtggtaatccttggaatggtaagggaccagaaggtcaagttgaagagatccttgaacatggtttggaaacgttagttggtgaatttcatccgctaactgatgaacaaagaaaaaacagtcattttatcggctatgctttgagtaacgataaaaagttgcataaataccgggtttatttgtctgaaaatggcttgatccctcaaatgggcgatatggttaaggtctcaattaaggattatccagatgaggaaaatcctgagtcaatgactggtgcagtagtcaacattattggtaataaaaatgaccctggtgttgacattatgtcaattgtggcagcacatgatgtaagaactgaatggcctgaagatgcaatggcgcaagctaatgctattcctgatcatgttactgaagaggaaaaaaagggtagagtagatattactgaccaacctgcagtcactatcgatggggatgattctaaggactttgacgatgctgtagttttatggaaaaagcctaacggcaattatcaccttggtgttcacattgcggacgtttctcactatgtgacagaaaatacgccgttgaacgaagaggcatttgctcgtggcaacagtacttacttagttgatcgggtaattccaatgctgccatttagactttctaatggaatttgttccttaaatgaaggcgtggaccggcttgttttgtcatgtgacatggaaattacgccagaaggtaaaagagtaggttataaaatttatccttctgttatgcgctcacatggtcgaatgacctacaacaaggttaacaaaactcttaagggcgaaatgaatggtttagaggataagtatgttaaactccgaccaatgcttgaagaaatggcagatttgcatgctgctttgtataaacaacgtcatcaacgtggtgctattgactttgaagaaccagaagcaaaaattattgttgatgatcaaggcaagccaacagatattgttttgcatgaacgtggtactgccgaaaagatgatcgaatcatttatgttaatggctaatgaaaccgtggccgaagatttcttcaaaaagcatgttccattcttgtaccgtgttcacgaaacaccagatgccgaaagaatcaagactttctttgaattttgtagcgcatttggcttgaatattcatgcggatccaaataacgttaagccaattgatttacaaaaagtagtttctaaaactacagatactccagaggaagctgtagtacaaatgatgatgctacgtagcttaaagcaagcgcattattcagaagaagcactgggacactttggcttagctgcagaatactatactcactttacttcaccaattagacgttattctgacttgatggtgcaccggatgatccatgcatatcaagaccaggggactaatgaagaagtgcaaaagcattttgctagttacttgccagatgttgcagaacaaacttcaacgcaagaaagacgttcaattgatactgaacgtgaagtaaatgacttgaagatgacagaatatatggccgatcaagtggggcaacactttgacgcggtagtatcttcggtaactagttttgggatgtttattcaattaccaaatacgattgagggattaatccatatttcgaatttgactgatgatttttacagttttaatgaaaaagcattgacgctaactggtcgaggtactcataagcaatataaggtagggatgccaattaaggtaaccttgattaatgctaacgttgaacaacatcagttagactttgaaatatatgatcctaatgcgcctaagcataagcataacgatcgcggaatgaataatcgtcgtcgtggaaaccgtggcttccgcaataatcatggacgccgtggtggtcagtttaataatcacagcgatcatggccgtggccgaggtaatggaaaccgtggaggtcggagaaattttaaacattagggattgatcttaatgaaaaaagaaaaagaagataatttaattgcacaaaataaaaaagcacgacacgactattttattaaggaaacattggaagcaggaattgctttaactggaaccgaaattaagtctgtacgagctagaagaatcaacttgcgggatggttatgtgcagatcgtcaacggacaagcctggctagaaaatgttcatattagtgaatataagcaaggcaatcggtacaatcatgagccactacgtagtcggcgccttcttttgcataaaaaagaaattgcacgtttggccaaagcacaatcagagcgtggtattgcaattattccacttaaagtgtatttaaaacatggctttgccaaggtattgattggtgttggccaaggtaaaaaggaatatgacaaacggcaaacaattaaagaaagagaccagaagcgcgatattcgacgcaagtatggtgtctaagatgagtctgagaagaatctcagactttttttgttgaaaaattttaaaaagttttttttattttcacaaagtaatgttcgaacaatttgaagaatgcagagaaaatcaagctaaatatttttttaattattatagaggcgaataatagtattaagatacgtttgatattgaaatattcatattaaaaatccgaacgaagagcaagacttgccaaagcggagaaaataaggtaaattaataaagtcgcttcgagagatgcgacgagagcttaaaaacagacatgcaaggaaagaaaacaaataaaaagaaaaaaagtacttgcaaagaagtaaataagctggtaatatatttaaatgtcgtcaggtgaaagcagaaaaagcttgagcaagacgaaaaaaacaaatcaaaaaagttcttgacaaagaaatgatggtttgataaaatataaaagctgtctgctttgcaaaaaagcaagacagaggtagtactttgaaaactgaacaaagtttcgctaaaagcgtgcgggtgtaaaaacccaaacaagaagcgaagtcaattcgcaagcaataaatttgagacaaagatcttaaataaggaatgagcaatcattcaaactttttaaaatgagagtttgatcctggctcaggacgaacgctggcggcgtgcctaatacatgcaagtcgagcgagcggaactaacagatttacttcggtaatgacgttaggaaagcgagcggcggatgggtgagtaacacgtggggaacctgccccatagtctgggataccacttggaaacaggtgctaataccggataagaaagcagatcgcatgatcagcttttaaaaggcggcgtaagctgtcgctatgggatggccccgcggtgcattagctagttggtaaggtaaaggcttaccaaggcgatgatgcatagccgagttgagagactgatcggccacattgggactgagacacggcccaaactcctacgggaggcagcagtagggaatcttccacaatggacgcaagtctgatggagcaacgccgcgtgagtgaagaaggttttcggatcgtaaagctctgttgttggtgaagaaggatagaggtagtaactggcctttatttgacggtaatcaaccagaaagtcacggctaactacgtgccagcagccgcggtaatacgtaggtggcaagcgttgtccggatttattgggcgtaaagcgagcgcaggcggaagaataagtctgatgtgaaagccctcggcttaaccgaggaactgcatcggaaactgtttttcttgagtgcagaagaggagagtggaactccatgtgtagcggtggaatgcgtagatatatggaagaacaccagtggcgaaggcggctctctggtctgcaactgacgctgaggctcgaaagcatgggtagcgaacaggattagataccctggtagtccatgccgtaaacgatgagtgctaagtgttgggaggtttccgcctctcagtgctgcagctaacgcattaagcactccgcctggggagtacgaccgcaaggttgaaactcaaaggaattgacgggggcccgcacaagcggtggagcatgtggtttaattcgaagcaacgcgaagaaccttaccaggtcttgacatctagtgccatttgtagagatacaaagttcccttcggggacgctaagacaggtggtgcatggctgtcgtcagctcgtgtcgtgagatgttgggttaagtcccgcaacgagcgcaacccttgttattagttgccagcattaagttgggcactctaatgagactgccggtgacaaaccggaggaaggtggggatgacgtcaagtcatcatgccccttatgacctgggctacacacgtgctacaatgggcagtacaacgagaagcgagcctgcgaaggcaagcgaatctctgaaagctgttctcagttcggactgcagtctgcaactcgactgcacgaagctggaatcgctagtaatcgcggatcagcacgccgcggtgaatacgttcccgggccttgtacacaccgcccgtcacaccatgggagtctgcaatgcccaaagccggtggcctaaccttcgggaaggagccgtctaaggcagggcagatgactggggtgaagtcgtaacaaggtagccgtaggagaacctgcggctggatcacctcctttctaaggaagcgaaggatatggagagcaggaatgctaagagaagtatccagagcaagcggaagcacactgagaaactttgtttagttttgagggtagtacctcaaagatttgaaaaacgccaagcgttagtcgggcctatagctcagctggtttagagcgcacgcctgataagcgtgaggtcgatggttcaagtccatttaggcccattgacataacgaagaaaaagagttaaagttatgtctggccgaaaataaaatactctgggggcttagctcagttgggagagcacctgctttgcacgcaggaggtcatcggttcgaacccgttagcctccattgatccagaaaaaggatcaaagagctagtacattgaaaactgaatataatccaagcaaaaaaccgagacaatcaaagagaacagattgtagagcgaccgagaagagaattcttgagtaaggtcaagtagaaaagggcgcacggtgaatgcctaggcactaacagccgaagaaggacgtgacgaactacgaaaagcttcggggagcggtaagtacgcagtgatccggagatatccgaatgggggaacccaatgcagagatgcattattgattagtgaatagatagctaatcaaaggaagacgcagtgaactgaaacatctaagtagctgcaggaagagaaagaaagatcgatttccttagtagcggcgagcgaagaggaaagagcccaaaccaagtgatttatcatttggggttgtaggactgcgacgtggcagtgtaagagatagttgaattatctgggaaggtaagccagagagggtgagagccccgtaagcgaaatctcaagcacgcctagcagaatcctgagtaggccgggacacgaggaatcccggttgaaaccgcgaggaccatctcgcaaggctaaatactagttagtgaccgatagtgaaccagtaccgtgagggaaaggtgaaaagaaccccggaaggggagtgaaaaagaacctgaaaccgtgtgtctacaagtagtcaaagcacattaaagtgcaatggcgtgccttttgtagaatgaaccggcgagttacgttatctagcgaggttaagtcagaaaagacggagccggagcgaaagcgagtcttaatagggcgaaaagttaggtgacgtagacccgaaaccaagtgacctacccatgaccaggctgaaggtgtggtaaaacgcactggagggccgaacccacgtaagttaaaaattgcggggatgagttgtgggtagcggtgaaattccaaacgaacttggagatagctggttctctccgaaatagctttagggctagcctcgtggagaggataatggaggtagagctctgtttggactaggggcccgtcaggggttactgaatccagataaactacgaattccagatatccatacacgggagtcagactgcgagtgataagatccgtagtcgaaagggaaacagcccagatcaccagttaaggtccccaaatctatgctaagtggaaaaggatgtggagttgcgtagacaactaggacgttggctcagaagcagccatcattcaaagagtgcgtaatagctcactagtcgagtggcgctgcgccgaaaatttaccggggctaagcatagtaccgaaactgtggatgtgttttaaagagcacgtggtaggagagcgttctaagagcggagaagttgaatcgagaggatcaatggagcgcttagaagtgagaatgccggtatgagtagcgaaagataggtgagaatcctatccgccgaaagactaaggtttcctggggcaggctcgtccgcccagggtaagtcgggacctaaggcaaggccgagaggcgtagtcgatggataacaggtagagattcctgtactgtgtcaaatcgttaagagcgaaggagggacgcaggaggtgaagcacgcatcgcgatggaacgatgttcaagcaacaagtgcggttaagagtcaaatgcttctaaccagcaacacgagttgtgaagaggagtgaattaaaagtagcgaaggtgtggtaatcacactgccaagaaaagcttctagccagagatgacatacccgtaccgcaaaccgacacaggtagtcgagtggagaacactaaggtgagcgagagaactctcgttaaggaactcggcaaaatgaccccgtaacttcggaagaaggggtgctagccaagagattggttagccgcagtgaataggcccaaacaactgtttatcaaaaacacaggtctctgcaaaatcgtaagatgacgtatagaggctgacacctgcccggtgctggaaggttaagaggagagcttagcgtaagcgaaggtttgaattgaagccccagtaaacggcggccgtaactataacggtcctaaggtagcgaaattccttgtcgggtaagttccgacctgcacgaaaggtgtaatgatttgggcactgtctcaacgagagactcggtgaaattataatacccgtgaagatgcgggttacccgcgacaggacggaaagaccccatggagcttcactgtagcttgatattgagtatcttttaaacatgtacaggataggtaggagccagagaagataggacgctagtcttattggaggcaatgttgggatactacccttgtttgaaggatgctctaacctcgacctgtaagccaggccagggacagtgtcaggtgggcagtttgactggggcggtcgcctcctaaagtgtaacggaggcgctcaaaggttccctcagaatggttggaaatcattcgcagagtgtaaaggtataagggagcttgactgcgagagagacaactcgagcaggtaggaaactaggacttagtgatctggtggtaccgtatggaagggccatcactcaacggataaaagctaccctggggataacaggcttatctcccccaagagttcacatcgacggggaggtttggcacctcgatgtcggctcgtcgcatcctggggctgaagtcggtcccaagggttgggctgttcgcccattaaagcggcacgcgagctgggttcagaacgtcgtgagacagttcggtccctatccgtcgtgggcgtaggaaatttgagaggagctgtccttagtacgagaggaccgggatggacgcaccgctggtgtaccagttgttccgccaggagcatcgctgggtagctatgtgcggaagggataagcgctgaaagcatctaagtgcgaagcccccctcaagatgagatttcctttgcgtaagcagtaagacacctcagagacgatgaggtagataggctgggagtggaagtcctgtgaaggatggagcggaccagtactaatcagtcgaggacttgaccaaagcgaagcaaactggaaggttttttgcgagaaggattatgtttagttttgagtgtaaaagctcaaaagagtacggtggcgaaagcaagaaggatacacctgttcccatgccgaacacagaagttaagcttcttaacgccgaaagtagttggtgggcaactgcctgcgaggaaaggaagctgccgtgctcttttttaatattccggcttagctcagttggtagagcgcttgactgttaatcaagatgtcgtcagttcgagtctgacagccggagtactttgtatggaatgttgtccgagcggcttaaggagcatgattggaaatcatgtatacgggcttatacctgtatcgagggttcaaatccctcacattccgtaaatatatatgaattggaactatgttaacatagttcctttttttctacctaatttttcatatataatggagaaagggaggaaatatcgtgaagctacgaaaactaattccatttttatttttaatatctctattagctataacattttccgcttgttcgacaaagggagaagagaatactgctaagcatagagttaatattgtaacttctactaatatttatgcagatattgctaaaaatatagttggtaaacatggtcatgtacaagctattataaaaaacggcgatacagatccacatgattttgagcctacgactggctctgccaaagaagtagctaatgctaatattgttattgccaacggtctaggatatgatgactggatgactaatttagccaatgctaatgatattcatgtggttaaagttggtaatcaattgatgggattaaaacagggggataatcctcatatttggtataacttaaacatgcctaaaaagtatgttgattatctagttaaaacagcaagtaaaattgatccaaaacatgcagcatattttaagtctaatgctgcaagctatttgcaaaagattgatagtataaagaaaattgctgctaaaattaatgggcgtgaagataaaccggtttatgttagtgagcccgtgtttgattatgcactagaacggtgtcattttaagattggcaatcaggcatttgaagaagctgtagaaaatgaaacggatccgagtgcgcaagttattcatgagatgcaagtcaaaattaaagctagaaaaattgctttctttgttaataatattcaagcatcaagtagtacagttagtggcatggttaaactagcagagcaacataatattccagttctcgatgtaagggaaacaatgcctaatggaattagttattattactggatgaaagcgaattatcaaaaattatttgaaatttttttaaaataactattgcataattagggactatcaggtaatataataagcgttgtgattgagagatcacggtggtaataactaataaaaataaataaaaaaagttcttgacttttaaaacatgattagttattataataaagtgctcttgattaagagatatgacccgttggtcaagtggttaagacacggccctttcacggccgtaacatgggttcaaatcccgtacgggtcactaatggaggattagctcagctgggagagcatctgccttacaagcaggaggtcacaggttcgagccctgtatcctccattgttcgggactaccgctgccgcggtagtctttttttatgcaaaaagaacgaacaagcaaaattattattttatcggttcaagtcctgagaggattcactatgattagtgaagatgccttgtaaccgaatagccaatgtctatatagggggactaatatggaaagacgtttgtttacttcagaatcagtttctgaaggacatccggataaagtggctgatcagatttctgatgcaattttagatgcgatgttaaagaaggatcctaattcacacgtagcttgtgaaacgatcgtaactactgggatggtttttgtctttggtgaaatttctaccaacgcttatgttgatattcaagatgtagtgcggaagactattttgaagatcggctatgatcgtccagaattaggttttgatggcaataactgtgctgtgatggttgacatcgatgagcaatcacctgatattgctggtggggttgatcactcacttgaaactagagaaaacaagtctgataacgatgaattggatcaaattggtgctggtgaccaaggtttgatgtttggctttgcgattaaagagacacctgaactcatgccattaccaatttcgcttgctcatcgtttaatgagacgtgttgctgctttgagaaaagaccatactttagattggcttcgtccggatgctaaggctcaagtcactgttgaatatgatggaaacaataagccattaagagtggatactgttgttatctctactcaaactgatgcagaagtttctaatgaagaaatccatcgggcaatgattgatttagtcattaaggaagttattccggccaagtacctagatgaaaagactaagtttttgattaatccgtcagggcgttttgttattggaggtccaaagggcgattctggtttaactggtcgtaagattatcgttgatacctatggtggttacgctcgccacggcggtggcgcattttcaggtaaggatccaacaaaggttgaccgttcagctagttatgcagctcgttatgtcgctaaaaatattgtggctgccggccttgcttatcgctgtgaagttcaattggcttatgcaattggtgtagctcacccagtttcaattatgattgatactgcgggtactggtaaggttgacgatgatttgttaactgaagcagtacgcaatgtttttgatcttcgtccagccggtatcattaagatgcttgaccttcgtcgtccaatctatgaacaaacggccgcatacggtcactttggtagaacagacgttgatttgccatgggaaaagactgataaaacacaagatttgcttgattatattaaaaataagcaataaataaaaagaggaagtaaaaaagaatgaaaaaaacaaacgtgcctatagtcacgcttgcgatttttatgacaacttttatgactgccattgaagggacaattgtttctactgcaatgccaaccatagtttctgacctagatgggctcgagattatgaattgggttatatcaattttcttgctaatgacggccgtttcaactcctttatatggaaaactggcggatagcattgggcggaagccagtttttttgtttggaattgcgttgtttgtcataggctcatcgctgtgtggacttgcacaaaatatggtggagcttatcttattcagagtaattcagggattaggttctggcgcggttcagccagttgccatcaccattattgcggatttatatgctctgcaaaaaagagcgaaaatgttaggtcttaactctggtttttggggagtagcatcagttattgcaccgctattaggtggctttatagttcagcatctatcctggcactgggttttctacatcaatgtgccaattggaataattgcctttttgctcgtaattttttgtttgcaagagcctaaacatagctctaagtctaagttagatttgcagggaaccatttggttagtaattttattgctagctttgatgtttttcttacaagatttaggttcaaacactaatatcgccataatggccgctctagccgttttagtggtaattagtataattatgttctttagagcagaaaagcgcgcagttgatccaataatgccactcactatgttaaaagataaggagttccttgcaattaacctgattacgttattgatttctggcgtagtaatcggctttgaattttacattcctacctggatgcaaggtattaatggtactaatccatctctagccggttttgctgtaacgcctagttcattaatgtggattgtgggttcattcttgattggtggaatgttcggccgctgggggattaaaaagacatatgattatatgttattggttttagttgtggccgatttggttttgattttagtgccgatttacacatcattctgggtcttctgtgttattgctgcctttaatgggaccgcctttggtgcgattacgacagcttcacaggtgagatcgcaggttttggtacctaaggatgacataggtgttgccacttcgtttaatacgctgatgaagtatctgggacagacaatgatggtttctatctacgggattgcttttaatacgatgttggcgcatgggttaagcaagagaccggggttgaatcaagaaatgatgaataaaattgtttctgcagaaaatgccaaaagtctggctgccaatgtagtgccacaattacggcaagttttgttaggcgggttaaaagctgtttacgttgtttctatgattgttattgtagtctcgattgtattgaatcaattgtatcgagatcgaaaattgaagaaaaattaagttgaaggagccacatgcaaagtagagcatgtggcttttttctaccaaaaaatttattatttgataaattttaaaagaaaatatgaatttttaatttataaaaaagcaaaaaataatattttatgattaatattgaattattatttcaaatgtaatatcataagacatgtaagggcttacacacaaaaagatgcaagctaataaatcaactattttctataaggagggtaagacgatggctgataagtattcagaattaggtcgcgagatttatgcaaatattggtggacctaataatgttaagtcaatgtatcattgcatgacacgtctgagaattaaaattcgtgataactctaaggtagatattcagggtctgaaagatattgacggagttttgggcgtagtaaatgcggacacgttggaaattgtccttggttctggagttaatgctaaagttgcacaagatatggttagccaagtgggagttaaagaaaacgaagaattcccaactaacacttaccagagcgaaaagtctgaagttcaagcaaaagctgcagaagtacatgctcaacataaagcacagttgaaacaaacatggtggcgtaaggctttagaccatatttccgctatcttcattccacttattcctgcatttattggtgctggtttaatttcaggtgttgctggtatccttcgaaatatgttgacggctaagatgttgcctggtagctggaacttaggcgttactattctcagtatgattgctagtgcattgtttgcatatttgaacatttatgtaggtattaatactgctaaagaatttggagctactcctgctctaggtggtatcatcggcggtgtcgttttgcttcctgggattgctgcaccggttactattccaaatgtattagatggtaagccactagcagcaggccaaggtggtattattggtgttttacttgctgtatggcttttggcttatgtagaaaaatggttccataaacatattccagattccgtggatattatatttacgccgttctttactgtcctgattatgggactattcacagtatttgcaattatgccgattgctggttggatttctaattcattagtaggtggtattaattgggtgctcgatgttggtggtcctgttgctggattcatccttgggttgttcttcttaccaatggttatgctcggattacatcaaatccttacaccgatccatttatcaatgattcaaaaaatgggttatacaccattacttcctattctggcaatggctggtgctggtcaagttggtgctgcaattgccctttgggctaaatgtcgtaaaaacaaggatttagtaagattgattaaaggtgcgttacctgtaggtattttgggagttggtgaaccattaatttatggtgttactcttcctttaggtagaccatttattactgcctgtgttggtggtggtattggtggtgccgttgttgccgcatttggtcacgttggttcaattgctatcggtccttcaggtgttgctttaattccattaattgctaacaacatgtggtgggcatactgtattgggcttttatccgcatatgctggtggatttgttgcaacttatttctggggtgttcctaaagatgctattaaaggcaaagttgaaaatcctactcctgaagtttccgaaagaagagctgctgaaaagcatgctgataatttgaatatgcctagtgaaaaggttgaaatttcttttgaagctcctgtttcaggtgacttagaaaaaattgaagaagtaaaggatgacgttttttcacaaaagatgctaggtaatggttttgctattgatccttcaaatggtacagtggttgcgccagtagacggtaaaattgatacagtaatgaatactaaacatgcaattacattgaaaactagtaaagggaacttagatgttttaatgcatttaggattagatacagttgaattaaagggtgctccatttgaaattgacgttaaaccaggtgatctagttaatgctggtgaaaaaataggtacaatggatatcgctgcaattaaaaaggcaggaaaagacccagtggttttaactattattgctaatatggatcatattgatcaggtatcaaaagtagaagattcaccagttaaggcaggtcaagttgtctttaaggcaatgacaaaataatttttagaaagaaaatgatataaatgtcacttgaaaatttgactactgagcaacgaaataaaaatactatgcatattgattctatgtctacattagatatggtaaagacaatcaataaagaagataaaaaagttgctgaagcagtaggaactcaagatgaaaaaattgctcaagcgattgatattggctcagcacgttaccaacaaggtggcagattgatctatattggcgcaggaactagtggaagattaggtgttttagatgcggcggagcttgtcccaacctatgggatcaaaccagaacgtgcaataggtttgattgctggtggtaaaggcgcaatgtatgtagctgttgaaggagcagaagatgatcctaaattagcagctgaagatcttaagaagcttgacttatcagaaaaagatgtagtgataggtttagcagctagtggtaggactccttatgtaattggtgggcttgattatgctcaaaaagttggtgcagctacaattgcagttgcttgtgttaagcatagtttgattggtcaacatgcaaatgttgcgattgaagctgttactggtgcagaagtaattacaggttctactagaatgaaggctggcactgcacaaaaaatgattttaaatatgatttcaacagggattatgattcgccaaggtaaggtatatcaaaatgtaatgattgatgttttgccaacgaatgaaaagttagttgaacgtgctgaaagaatcattcaaactactacaaatgtttccttagaaaaagcagcaaaaattttgagggatgctgataaagattttggtttagcaattgtaatggccaaaacgggtttgaaaaaaaatgatgcacaattgttgctgaaagaacatcagaataatgtaagtagtgtcttgaaagaagaatagatataaattaaggataaggaagagtggcagtaagtaatttaatttcgctgattgaagaaagaagacacattatgaatagcaagaagttaattactggaggttgtactgtagcattatcagtgatgatgttggcaagtactgttacatatgctcctattagtaactcacaggtgtatgcgagtgtggtaaaacaaaagcaagaaccaacaggtcaatatcaaattaatgatagttttcctattgatgaaaagaatgataatcccaaatttgatacttggtcattactagataatattaatcgaaagttttatggcttcaaaggtcaaggatcagtttgggtacacagtaataatgccaaaaattttgaattatatattaatggaaaaaatgttagtttaaaaaacattagtagtaataaatgggtaaaaattgatatcagtaaatttacaaaaaatggaaataatgctttacagatttcaccaaagaaaggtgttagagcaagcgataaatttgatattaaattaccttatcctacattagttgataaaactaaagaatatcggaataatgatacatttaaaactatggatgcactaattaattctgagattaagaatggatttccgtctgcagagttggttgttgtacataatggacaaatcattaagagaagtgcgtatggtagagtaaatgcatactttcaaaatggtaaacgccgtgttaatgctccaaaagttaccaatacaaccatgtatgatttagcttctaatactaaaatgtgggcaacaaatatggctatccagaagttggtttctgaaaagaaattaaatattgatgcaaaagtaagtagtatttttcctgactttaaagataatgctaatgataaaattaaaggcaagactgatttaactgtgcgtgatattttgatgcatcaagcaggttttccagccgatccacaatatcacaacaataactataatccggacaagcctaatgaacgaaagaagaatgccaaccctgtatatactcaaaatagagacgaagtattgaagaagataattgctactccattgcaatatgcgcctggaacaaaaacaatttattcagatgtagattatatgcttctggggttaataattgaaaaagtaacaggtcaacgagaagataattatgttgaaaataatatttataagccattaggcttgcgtcatttgatgtataacccattagataaaggcgtatctaaaaataaaattgcagccacagaattaaatggtaatactcgggatggacagattgattttaataatatacgtcactatacattgcaaggacaagttcatgatgaaaaagcatactatacaatgcatggagtaagcggtcatgcaggattgtttggcgatgcttcagatttagcggttttagcacaaatggtcattaatcgtggcggttatggtaatcacagaatatttgatgaagatactcttgatgaatttataaaacctaaatctacaaactatagttatggattaggttggagaagagaagcaagtactacttacagcggtaattatggatgggccttttcaggattgtccgatgcttcaactattggtcatacgggttggacaggtactttgaccgtagttgatccacacgataatactgcagttatcttgttaacaaatgaaagaaacactcctattcttaaacctgaaactactgctactgcaaatgactttgctggtggtcactatttgctatctaaatatggtgatattgccagtcttgcgttcgctgcaattaataaggacaattcatctgctaataatgccaagttaattagtcttacaatgcagagatttaacgaaattcaaaagaataaagatgatcaaacaaatgcagataaagcagacttatgtggaatttatgatgctttaaaaatgcgtagtaaaaagcataattctgtagcaagatttttagcgactacaaaaggaaagcaaattactgcatacgttaaggcaaataagaatgccgttaataatgttcgcaatagtcattaattaagaataaaagccattcaatatgaatgacttttattttattagggaggttagatgctaatgctaggaatatctgtatatttccaagattatgatgaaaactatttgaaaaaagcagctcaagctggtgcaaaatacgtttttacgtcacttcagattccagaagaagattattcagatctggatcaaaaattacctggattctttgaactgtgtaatgaattggggcttgaagtaattcccgatgtttctccagcaactttggaaaagctaggaattaaagaaggcgattttgaagctttaaaagataagggattcaaggctttaagattagattatggttttgataactttgatttaatcaaaaagctacaaaaaaaattctttattttattaaatgcaagtgttgtgtcactggattatttagatcgtgctagaaatgcaggagttgattttaataaattagctctaacgtacaatttctatccacatactgatacgggtatgggatggtcagattttaaacgtaaaaattggatgttgaaggattatggcttaaggactcaagcttttgttcctggggatgcacttaaacgtttcccactatatgaaggcttaccaactgtagaaaagcatcgtggagtttcaccttacgttgcagctgttgaattaattcatgaggcgaatgtagatgatgtgtttattggtgatagccaggcttcaatcaaaaatctccaatatattgtagattaccaaaaagagaagactttaaacttagaatgctctttattgccacagtatcaacaactgtatgatcaagtgatcgaagtaagaaaagatatgccagaaaagttgattcgattaagtttatctagaaagcctgatattccagtttgcaatactttaaataggcataggggtactattacaatgcaaaacaaattagctcaaagatatagtggtgaagttagtctgattaagtcaaatttacattttgaagcacgtagtaatgtaattggctttatttcacctgagtatgtgaagttgcttgattttattgattcgaatacaaaaattatttttagaaggctgacatagaagaaaggtgatattatgcttaatttggcgaataagatttcagatgtatatcctaatttgaataagacttctaagttaattgcagacgtttattttaaagaaccaagaatttttctaaataaaaatttacaggaattaggtaccattacccaaacaagtggtgcatcagtcgttcgcttttgcagaaaattgggtttcaaaggctttaaagattttcaaatagcttgtgcgcaagaaatgcctaataaacaagatgctatggtagatacgattatcaatacaaatgatgaaccaacaagcgtgctttataaattgcaacttagcttaggaaaaaatattgcagacattggtaaaacaatagatcataaatctttagatgctgcagtagatttaatgcgatcagcacaacagatatatgttgcaggagaaggagcatctggtcttgctgctcaagatttgttttataaattaattcgtagcggaaagaatgttaatttcgttcaaagttcacatattgctttagaacaagtagcaaatattaataaagaagatatactaatcgttttttcctacagtggattaactcaagaaccattgctaatggcaaagcaggcgcaaaaaaataatgccaagatagttgcagtgactcgtatacaagattcaccactaaagaatatggctgatacagtaattacattgccatcaaatgagaagttattgcgctatggtgctattaattcactatttgcagaaatctttgcttctagcttgctatatttgagtcttatttcgccaaatttaaaagaactaaatatgaaaatgaaaactacgcaaaatttgactaatcaattaaaagtgtagaatctataaaataacaactaaataaatttagaaaaatcaaaaatattttcatgatgaaaataataaaaataaagaagtgtctgggaaaaaactaattctcagacaggaaaaaagaacgatgatttcctaatggatttcatcgttctttttctatactttaagtgccttccttgatattattgaatcaccacaaaacaaaaagaaagaaggcaatcttaatgtatcaaaattataccataggtcaaacagctttaacactcaacttagacttcgctattcctcataatcatttggctaataccattagctggtttgtcgattcaattccagaagatgtcttattgggtaatactgctaaaaccggtcgtccagcttatcatccagcgatgatgcttaaaatcttgctttttgcttattccagaagagtattttcaggcagaaaaatcgaattaatgctggaagaaaacgtgccgatgatggctttggctgaacaccaacagatttcttaccatactatcaataactttagatccagcaagcatgccaatgagctggttaagaaaagcttcctctactttaccaatttgttagaagccgagggccttatcaatgaaggagcgatctttattgatggcactaaaatcgaagctgacgccaatcgctatacttttgtttggcgcaaggcagttgaaaaatttcatgacaagctcaaaggtcaagcggttgagctttatgatgaattgattgccaaagaagtcgtcaaagcaatggcaaaagagaaagtccagaccagtcaaggtttggcagagctagcacaagaaacggaagccgagattgaaaagctgaccgaagaaattgagcaagaaccccaagcaatccctggcggttcgcctagaaaagcaagaagacgcggtcttaaaaagctgcttcataaactaagaaaagactatgttcctcgaatgaagaaatatgaagaggcgaaagaaatctttgcagggcgtaacagctattctaagacagatcatgacgcgactttcatgcatatgaaggaagatcacatgaagaacggccagctcaagccaggctacaatattcaagctgccaccactgatcaatatgtggttgactttgctttataccctaatccaactgatttcagaactttcgaaccatttttaaagcagatgacgacactagacaagtttgacaagattgtcgctgatgctggttatggcagcgaatataattattcaatgttagaagaagagtattcagacaagaagtactatattccttataccatgtacgaaaaggaaaagaccagaaagtatcgcaacgatccaactaagctggctaactggttctatgatgaaaaagatgattattaccttgatcaaaatggcgtcagattcaacttcaaatattatagtcaacgtaaagatcgatcgactggtcaggttcgtgattttaaggtctatgaagcagatgaatttcaactaacgccagaattagaacgcttagccaagactaagagcggacgccaacgtcaggttcgctataatcctaactggcaatacctaaaagaaaaagccaaagcagttctccaaagtcctgaaggcagacacatctacagcatgaggaaatatgatgtggagccgatttttggacatttgaagaacgtctttggcatgcgccgaactcatttaagaggcaaaaagaaggttgaaacagatataggaatagccttcatgatggtgaatttaagcaaatattggaacagaagatggtcaaaagaccaattttctttgttcaaaaataaaaatagacagaaaaagacggtcaagcaactcaaattaagagttggattgatcgtctttcagtatctaagggttagttttttcccagacactagtactttttttgcggttggaataaatctatatttgacaatgctataattataaatggaaagtggcctaaaaataagataacactattgaaagcgcattatttgcctccttgaaagtaaatctaagtagctgtacacttaaattgagctgaataacgaacgttatttttggcagagacttgtaatgcgagtaggaattatgggggcgtaaaaatggatattactagtttagcaagattccaatttgctatgacgacgatctttcactttttcttcgtgccattttcaattggtacgatattcgttgtcgcaattatggaatcaatgtatgttcatacaggcaagcctgaatataaaaagatgaccaagttttgggcaatgtcattaagttaagacattgacaaattgaatctaatctctgtagaaccgaatcattatgatttggttctttttttgcataaaataaaggagaaaagaacctaccttttcgccctctgattaaattattaaaccttcaaaattattgccagaaagctggtgttaattatgaaagcccttcacagaaatattttagatcgtcttgatcaaattatcaatgatactggaaagcatattcatgattttatcgatgatcctcatgccttcactaggaagcggtttttagatgcagctacagtcattaaaactactattaatatgcaaggaaaagatttgaccagtgagttgtttagagcttttggccaaaaagctattaaaaataacgataaagtggtcagtacttccgcttatgtccaacgcaaaggtcagctttcacccgcatgttttaagcatattctaactgtatttaatcagaatttatttaatatccagttatttgatcataaatatcgtatatttgccattgatgggtctgattttaatcaaatctggaatcctaaatcagagaatatcgttggaaatctcaatcataaaggaaagccatattgccaaattcatgttaatgcactctatgacctgttaaataatacttatcaagactgcatctttcagcctaagtcaaagatggatgaacgtaaagccgccgttcaaatgcttaaaaagctaaattgcggaccatatatagttactatggatcgaggttataccggctttaacatgattgaaaattgtaatcgcctgcctaactgttattatgtcatacgtactaaaacgggatatggcgcatttaaggaagtagctgagttgcctaatcaagagtgtgataaggatatagcttgctgggtgactacctctaattattattatgaaacccataaggctacagaaaacgttcatttggttaaccatcattaccgtcaatatataaaatatcggtctaaaaataccaaagatggcagctgggactttggagagttatgtacaataaaatttcgtgcctgtaaatttagaattaatgatcctaaatcaggcaaagaagaatgggaagttgttctaactaatctaaatagagccgattatcccttaaaaaggatcaaagaaatctaccatttgcgctggggcattgaaacttcattcaaaaagttgaaatatgctttaggtagcgtacagtttcattccaagcaggatagatttattgaaatggagatctatgcccacatgattatgtttaacgcagtcagtcaaattgatgctcaagcatatgtaccacaaaaaaaatgcaagtatcaatatgcgatcaatttcaaacagtcatgttttgtcatccaggctatgtatataatttcttcttcaactgaaatctttaaaaagattcttattcaaattagtcattacacaattccgatcagaccaggacgaaaagacaaaagaaatctcaaacccaaatcagctgtatattatttatatcgtgtagcctaatttctaaacaagatttaggtttatttggcatgaaaaagagcattcaaatgcgataaatcgcaaatgaatgatcttaaaagtccaagtcgataatttgtcaatgtcttaacttaatgacattgaagttttgggctaatatctttttattgagttttgccgttggtgttgtaaccggtatcattcaagaattccaatttggtatgaattggtccgattattctagattcatgggggacatctttggtgctccacttgcttttgaagcattgttgtcattctttattgaatctacctttattggtttgtggatgtttacttgggataaagtggggaagaaattacacttattctttggatggatgatcgtctttgggacaatgacttctgcattatggattttaacagcaaactccttcatgcagcatcccgtcggctttgctttacgcaacggtcgtgccgaaatggctgactttggagcacttcttaagaatccacaattaatgtatgaatatggtcacgtaattgttggtgcacttttaactggtactacaattttgactgggttagctgctttccaactattgaagaaacgtaacctttcagacattaacaagaagatctatcgtaagacaatgcgtttaggcttaatcttaatgttaattttctcagctggtgaaattgctgtgggtgatatgcaaatgcaatatactttgcatgatcaaccaatgaagttcgccgcaactgaagctgtttataagacaactggagaaaaggctccatggacggtagttgcaattgctaatccaaagacccatgaagttaagggaattgatattccagacatgttaagtattctttcttaccacaagactactggttctgtaaaaggtatagaagaaattaacaaagaacttgaaaagaagtatggtacacatattgatggtcgcaagatggactactatgtaccagttaatactttattctggtccttcagagtaatgtgtggttttgctgcattattattcttgatggcaattgttggtttaatcatgactcgtaagaataaagaaaccctttataaccatcgttggctattatggatcttcgcacttcttacattctcaccattcctggtcaacactgctggttggttaatcactgaactaggccgtgcaccatggacagtttatggtctattcactattgatcaaagtgtttcaccgaatgtttcagtggcttcacttttgacttcaaatattgtttacttctgcttgtttactgttttggcaattatcatgattgcattggttgttcgcttcttgcacaacgatccagatgaatatgataaggctcaagaggcaagcaaagtagttgatccgttctcaaagggggccatctaaaatgtcatttttacaaatactttggtttatcttaattggagtattgttctcaggcttcttcttccttgatggttttgactttggagtaggaatggccgtgaagactttagctcataatgaacctgaaagagatcaagttgttaggacaatcggaccagtttgggatggtaatgaagtttggttgattactgctggtggtgcaatgttcgcatcattcccatactggtatgcaaccttattctcaggttactatttaattttattattgatcttagttggcttaattattcgtggtgtgtcatttgaatttagagcaaaatgtgctccatatcaaaagcatatttgggataatgcaatggcgatcggtagcgtaatggccacctttctctttgggataatgtttatctcaatgattaaagggatgccaatcgatgctaaaggcaatatttcagctagcttctttgactactttaactggttctcaatcgttggtggtattgctttaacacttctttgttatttacacggcttaaactatattactattaaaactaagggcgttatttcagatagagcacaaaactatgcacaagctttatactgggtactctacgtcggtgaagtggtctttgctttattattgattttccaaaccgacttcatgagagtacatccaattgcaactttagtatgcttagcattaattgttggtttctctgtagcagcacatgtagctactttcactaacaagcaaggaatggctttaacttgcagtggattaacgttgatctcattggtcgccttaatcttctgtggtttattcccaagagtaatgatttcatcaatcagcagtaaatatgatttgttgattcatagtgcatcatcatctaactacactttgattgttatgactgttgctacttgcatcttggtaccatgtgtcttggcttacaccatctgggcatattggatttttcgcaagcggatttcaatgccaagaatcggagaggttaaataatgattgataaacagctatttaaaattgatggcgctggttcaatcttaaaaaaacttgcagggcttgagattctgcaagctttttttatagtaggacaagccttggcactagcgtcagtcttaagcaaattgtgggtaggtcaacctctcgattggctactactaattacttttgcagcttgctttatcgccagacaattgatcagcacactgagagattcaatgttagaaaaatattccggtcgggttgcagaagaattaagacagcagcttttaaataaagtctttcgtgatggacaggctttagtacaaaaacaaggaaccggtagtttgattactatgtccctagatggtgttgatgaggtcaggcaatacattaagttaatctacagcaaagttttaacaatgatgattgtgccagttttaatctttgtcggcatgctgtttttaagctggacatcagctgtgattctgctagtcatgtatcctttaattgtcttattcatgattatcctaggtcatgctgcacaggatcgagcaattaaacaatttggtaactttcaggttttatctaataactttattgattctttaaggggaattgatacgctgaagtatttaggcctgagtaaaagatattccaagtcaatttttaacttgagtgagggttttagaaaaaagacgatggcggtgctaaaagtagcaatgctttcaacttttgccttagactttttcactaccttgtctattgcaatcattgctgtttttcttggttttgacttgatgaatggtaaaattgcactttttcctgctttaggaattctgattctggcgccagattattttttgccaattcgagattttgcgggggatttccatgcaaccttgaatggtaaaaatgcctttaagcggatcaacgaattgattaatctgccagaggaaaaaactaatgatttacctttaaaaacttggtcagctcaagatcaattgaagatcaagaacttgaagtttacttatcaaaagggaaccgaaattggaccggtttcattacaagttcaaggattcaagaaaattggcattatcggaatgagcggatctggtaaaactagtttaattaacctgctcagcggctttttgactccggatcaagtgcaaattgaactacaagggcagaaaactacgaccatgaatattcctgcttggcagcgtcaaatgacctatattccgcaggagccatacgtttttactaagagcttgcgtgaaaatattgctttttataatccgcaggcaagtgatgatgaaattaagcaggcgattcatatcatgggtctggatgccttgttaaatgatttgcctaacggacttgatacggtgattggccgcggtaagcgtgtcttgtctggaggtcagtcacaaagaattgccttagcgagagcatttttggatcctaagcgaaaaattatgatcttcgatgagccgactgctcacttagatatcgaaacagaaattgacttaaagaagcggatgatgccattaatgcaaaataaactggtcttctttgcgactcacagactgcattggttaaaagaaatggactatattctagtgatggatcacggtcaattggttgagcaaggaagttatgagcaattgcagcaaaatcaaggctacttctgcaagttaatggcaggaatgagaggtgaaaacaatgatcaataagattccggttttaagagcattaaaaaatgatcgttgggttcgcccatatttggaaaaatatcgtaaaacgttgattttggcgattgcactgggcattttaactttcgtctgtagcgggggcttgatgttctgtgctggctatttaatcagccgttcagcagctaaacctgaaaatattttgttaatctatgtgccaattgtcttaactagagcatttgggattacgcggccagctgtccgttattttgagcggctggttagtcacaattgggtgctcaaaatgacctccaaatttagacaacagctttatgactcattggagcgcgatgcgactatttttaatagtaagtatcagctaggaaatattctgggacttttgtctgatgatgtcagccatattcaaaacttttacctaagaacgatctttccaatgtttgtagcttggggcttgtatgcaattatcgtaattggcttaggcatcatttccccactgatgggcatttggatgttgatcctgtttttcttgattatttttgctattcctatttggtcagtcttaatcaatggtgcgcggcaaagctatgaaaaaacggttcaagacaagctctacgttgatttgactgataatgtgatgggagtagatgactggattttgtctggccgcagcaaagaatacttggccttgcacgtcaatgatcaagataaatttttgcaaatcaacgcgaagatgaaaaaatttgatcgctggcgcgactttgttttacaaatcttctgggtgttggtaattgtgagcctagtaatttggggtgctgccagatttggcgggcgttcaacttattatactaattggattgcggcatttgctttggcattattcccgactgttgaggcttttgccagtttgccgactgctgctcaagagacgaatatctacaaagattcgcttaagcgtttgaataatttgccagctcctgatcggactaagcataaaccaatcaaattaaccgcaccgtttaatttagtattaactgatgtgcattatgtctaccctcaaactaataaagaggttttgcatgggatcaacttaaatatccatgatggtgaaaagattgctattttgggtcgtagtggtgcgggtaaaagtcctttagctgccttgctcagaggtgatcgggtaccagctaaaggacacgtaactttaaatggaattgataccagcaagtttggcgatcaaatgtccaattactttagcatcatcaatcaaacgccatatttgttcaataccacgattgctaataacttgcggttaggtaatgaagatgccacagatgaacaattatgggacgttttgcgccgagtaggtttggccgagatggtgcaaaaattaacggatggccttgatactaaggtagatgaggcaggcttacgcttttcaggtggtgaacgccatcgtttagccttagcgcgaatcttactgaagaatacgccaattgtcttacttgatgagccaacagttggcttggatccaattacggagcaagctgtaattaatatgtttattaaggaattatccggtaaaactttaatttggattacacaccacttgcaaggaattgatcagatggatcaagtaatttttattgaagatggacaaattaatatgcagggtacaccggaaaaattatggcagacagagccgcgttatcgtgaattgaaaaaggctgatttaggattatagaggttcattatgctaacgaataaagtgccagaacaagatgtgcatgacctatttactagggtcgcgcctaagtatgatttgatgaataatattgttagtttagggattcaaaagagttggcgtaagaaatttttacggcagttagatttaaataaaaattctatttgcttagatttgtgttgtggtagcgctgattcaactattgatttggctaaaaaagctaaattagtgactggtctagattttaaccaggagatgttgaagattgcccaaaaaaagattcgtcaaaagcagctgcagtccaagataaagttgattgcaggggatgcaatgaatttaccttttacggccaatagctttgattgtgtaactatttgttttggcctgcgtaatgtccctgacgctgttaagacgattcaggaaagctaccgcgtacttaagccgggcggacaatttgctgttttagaaatgtctcagcccactaatgcattagttaaatttggctggcaagcttattttaaaatttttccgtattttgctaagttgacacacggtaatatcaaggactaccagtatttgtcaaaaacaagtaaagaatttctctcggctgagcaattaaaaaagctacttgagcaaaatggttttactcgagtagcggttactaagttaacttacggtgcaggtgcgattcatttgggacgcaaagactaaagcgttcgattgactaatttacgcgtcatctttttgagcaagacggtcgcattagtttgcggcagttgggctaagttagctaatgcccgattagtgtattgttcagctaaggcatgagtttcttcaatgactgagctgtttagcaaaatcttttggatttgttcgatatcgtttttgctcatttgtcgctttttttcaagtagcggtactaattgctctcgtaattcctttttgctaagagctagcagaagaggtagagagtagacgccggtagtcaaatcttctagcgttggcttgttcaggtgcttaccgccagtgtaatcaagaatgtcgtcaacaatttgaaaagcaatgcctaagttttcaccaaaggaggctagggcttgagtagtttgctcatccccattgccaaaatggcttccttcttcggcagctaaacgaaaaagtgcagctgtctttcctttaacattagttaagtagtcgttgaaatcttggcttaggttaaaacgttcagccatttggcctaattcaccagcaagtaaatggtgcattgtgtgagcatttttaatcatgtaatcttgttcggaaatggcgttcaaaattaggtcaaaaaagtgcgtaaaaagcaagtcgccagcgtaaactgcggtgtctttgccaaaacgggcttggatgctaattttaccgcggcgctcgtcagaatcgtcaatgatatcatcatgaattaatgaggccatatgcaaaatttcgattgatgaggcaagttgaataatttgttttgatacagtttcttttttgctagcaatttgagctgacaaaattagtaaactaggccgtaaatatttaccaccgttactagccatttcaaggagtgcatcttgcaagtctgaatatggagtgcggatggttgcctgaattaattgattaacttcttcaagcggtttacgaataagtggatatttttgccaaggttgagagttattcatgatagatttccttataatagagttaacagaatagtgatcctttgaaaggatgtggatcgatgtcattaagtgtatttttagaattaattgagattaaagcaaaaaccgctagtgtcattccctttttcttagggatgtgctacagcgtgtattattatcaccaggttaactggggatttgccctagtcttcttcattgcaatgctactatttaacatggtagtagatatgtttgataactactgtgattattatcacgcagatagcaagaattaccaagagaagactaacattatcgggcgagaaaatatttcacctaatttagttctgggattaattatttcctttagtcttattgcaattttattaggtttgtatctagtcgctaaagtaggcttgcctgtattgtggatgggcttgttctgttttatggttggttatttatattcatttggttcgcatcctatttctagcttgccactaggtgaattgttctctggtttcacaatgggcttcatgattgtcctgctcagtgtttatatcaatagttttcaagcttttgattggaactggatcacaatcggtcgtatcttcttattagctttagctgatgaattatggatttctaatttaatgctagctaataacttatgcgatgcccaagaggacgaggataatcaccgcaccacaattattcactttattggtaaaaaaggtggcttgattgcttttagtgtcaaaaatattttagcatttttggtaatcttcctcctaccgttcttgggaattgctcctaagacggtttggttaacagtaataattgtaccgttcgtttataagcagaacaagatcttaattggcaagcaagttaagacagagacatttatcacaggagtaaaaacgttgctagttggttcactgacttacttaataacttactttttaggaattctattttagagaggttgaaaattatgaaaacagttgtagttttaggtgctggttttgccggcttgaaaacagttgtcgctttgcaaaagaagttgcgtgaacaagttaagattatcttagttgaccgtaatccataccactacgaaacaattcgcttatatgaagtggctactggtgaaattccctacactgggatgtcatatgaaattaatgatgtaattaatccgaagatgactactgtgattacggatgaagttgaaaaagttaatattgctgataaaacagttgagttaaaggatcatgctccacttaaatatgactattgtgttgttggcttaggctttaccttgagcaatatgggcattaaaggtgtaaccgaaaatgctttgccaatgagcaatgtaaaacaagctgaagctattcgcgaccacctttatgccgaaatgaaggcttatcgccaagaccatgattctaaacacctgtcagtagtaatttgtggggcaggttttcaagcaattgaattaggaaatgccattgccaaggttcgcccagaactagctcaaatggctggcgcccaaccagatgaaattaccatcagaatgattgatggttcgccacgtcttttgccaatgttccaaggtaaattgcttgattacgctttaaacacaattaagaaaaataaagtcgaaattattaagccagcttatgttaatgaagtaacctctacctcggttttgtataaaatggctaatgaaaaagacaatgctgagctgcaagaaattaaggcaggtactagaatctggatgatgggctttagtggcagtccagtaattgaggcatctggatttaagaaccgtcgtggtcgggtcatggttggtgatcatttaaccgcgccagaaagtgatgatatctacgtcttaggcgatgtttcaagcgtcatggttcctggtaagaaatggccatatcctaacactggtcaattggctctttcaatggctaactacgctgcaaaagatattaagagcagaattatgggtcaaactagaccggataaatatgcttaccatgacttaggtgtagtagttaacttgggtaattcagaagccgcaggattggcaatggggcatgcttttaaaggatactttgcagcaactcttaagaagattaccattgataagtcggttcttgaaactggtggtattaaagaaacaatggcgattggtcaatttgacttctatcactaaaattgaaaataaaagagaataaaaaatcacttcagtttgatttgatatgaaccccaaatttgggacatattattgaactgctttatttaaaaccatatttcgatattctatcggagtatggttttttagtactgttttaattctttcatgattgtagtaatgaatgtattaggactaaagtgtgaagttgcgccattttatgccacaccaagaagacctgctattcaccacactatgggtggcttagtaatcgacactaaggctcatgttttaaataaggacggtcaaatcatcgctggtctttattcagcgggtgaaaatgctggtggtatccatgccggtaaccgtttaggaggaaattctttagcagatatctttacctttggtagaattgctgccaatactgcttatgaggataaacatgttaccgatgttattactgacgcttcgcagaaataaagatagagtataaaaaaatacagatatatcaatttaaatattggtatgtctgtatttctatttggagtcatttttccttaccttcgaataaaaacccatgatttctaattcttactaacaaaaataatagtaacttttttctaacttcccaaaaaaattttgcgacttttttgcgtaataaataatagaggataaatatcctcaaattatttaaggaggactttgcatgagcaaagagaaagaactaaatgtgtctgaagcattaggttttacggatgatttgatgtttcagaatgttatgagagatctgtcgtatgttcttgaatgaggttctaccacatttggacattcaagatatcactgtccgcacgcaagaaaggattgcttttaaccaagaagagaaagtttcgattcttgatgtcctgattacggatagcagaggcaggcgttacaatgtggaaatgcaggtcgcgcataaagcagacatggataaacgagccaggcaatacctgttcaagatgatggaagatggctttttacgacgaaaacaagaatatggcgagctgcacgctgcatatgtaatttttattctgccgtttgatcccaaaggaaaaggcttgaagcgatatacttttgtttatactgctaaggaagacccatcagttgaattaaatgacgattctgcgttaatatatttaaacacaaagggaacaaaaggcgagatcagacctgagcttgatgacctttatcgcatgattgaaggcaagccaacttcaaatggaaaactcgtcagtcgaattaaaaagtcgatgaacaattatcgtagaaccgaagaatggaggcaacacgtcatgaacacagaataagtagcagaagcagcaaagcagcttggcatggaagaaggcatgcatgaggcaactgttgcagcaatccataaaacgattaacatgcttagaaggatgaagcgcagtcccaagcaaatcttgcaagaattagaacaagattatggcaatgaattttctgaagaagaactagcagactttgtgaaaaacgcctagtcgataagatataatgatagctgtgaagctatcattttttagataacgggggcttgatcatgaataatcctgaagaattacaacattttttagatgttctgctaaaagagagtaactttaccagagcagctaaagaattatatatttcccagccttatttaacgcagctaattggacgaattgagaaaaaattaggcactaaggtcatcaaccgagatgagagaccctatacgttaactcctgcaggtctaatttactatcaatatttggagaatgtttcatataataagcagcaattagggcgcaagctggaggcatatactcatcctgaccaacagataattaaaatcggcattttggagagcttaggtacatatttattgccagaaattttgccgcaatttttgcaagaaaaccccaacgtcaagattcagctatttgaaaatttccccagagaaaatgaaagaagactgcttaatggcgagctggattgttatattggtcagacgccagaagcacttgactcgagtttagatgtggttgcgggtggcgaggaacgctattacgtagtgatttcgccagcctcaccatattaccaagcaggaaagtttatcttaaattcggatgaacttgatctaaaagaggtactgcaagagcctttagtgttgagttcacctggttcagctatccggcatcaagttaatggcttatttcagagattaagactcgaaaaaaatattgtgatggagtctaatagtattattactgcaactaacttggcaattcacggcgtgggtattaccatttcttcggcaagtattatcagaagaatggaacaaacgccaattaacttgttgccactagatcgaaagttaatggatgttgtctttttcattgctagcaaaagcggggaaaagtcgccagcgttagaaaacctaatttcaatttttcaaaagacgcatttacaagcaaaaataggataaagaaaaaggcatcatgcgatgccttttaaattgctttgatttctattgttttcgtttcatgtcgatcatcttcggctcaatgtagaagtgatagaggaaggaataaccaagcagtacaaaggaaattccttcaatccaaccgccgaatacatcagatggatagtgcacgtggacgaaaattctggtgtaaccaatcatcagtgggaataaagcccaaataataatcaataaagtcttccagaatttgcttctcactaaaagaatggttaggataatcaaaacaccaaatagcgccgcgctaccaactgagtgccccgatggaaaactataaccatccgcataaactaagtgcttgaccgttggacgctgccgcattgctgcgtgtttgataatccaattatagccattagcacagatcatgacaccagcggtaaaccaagcgtatgcatattgcttaaagaccagtaaaactatgaaaacaatgattgtttcaattgtgatcacgcttgtattgccgagattagtaaaatctttagcaaaagcgacattagctggattattgttgcaaacaatgttgaccacagcattatcaaaattgtgaataaattgtgagccggatgaaaccagtgcggcccagacagcataaataaccacgaagcagataccaggtattaaggtgtccttaggtggtcgtttcgtattaatcaaaaaagtactcccctcttgaaatttatagcatttgtggtaaattataatcattatctataagaaaataaaggtcgagaagtagtaacaaggatatttttttcagagagagactggttggtgcgaagtcttagaataaaattgtgaactcgtctcttaataaaacctagcgttgccatccgcgttaaggagcaattaagtgtcacaattttgtgaaacttaggtggtaccgcgatgattcgtcctatgattttttcatagggcgttttttgatagtaaaggagagtttatcttgtataaccacaaagtagttgaaaagaaatggcaagattattggtcaaagcatgatacctttaagacaggtactgaccctgataagaagaattattatgcattggacatgttcccattcccatctggtaagggacttcacgtaggtcacccagaaggatatactgcaactgatatcgtttcaagaatgaagcgtgcacaaggctataatgtgcttcacccaatgggctgggatgcatttggtttaccaactgaacaatatgcattgaagactggtgaagatccagaagttgttactaagaacaacattgctaactttaagcgtcaattgaacaagttgggcttctcatatgattgggaccgtgaagtaaccacttcagatccaaattactacaagtggacgcaatgggtttttgaacaaatgtataaaaagggcttggcatatgaagctgaagttcctgttaactggtcaccagacttaggtactgttgtggctaatgaagaagttatcgatggtaaaactgaacgtggtggctacccagtatatcgtaagaatatgcgtcaatggatgcttaagatgactgcatatgccgatcgcttattagaagaccttgatgatttggattggccagaaccagttaaggaaatgcagcgtaactggattggtcgttctgaaggtgcgcaagttactttcaaggtaaaagacagcgacaagacttttgatgtctttactactcgtcctgatactttatttggtgttagctatacagttcttgcaccagaaagcaagcttgttcaagaaattaccacacctgaacaaaaagaagcagttgatgcttacattaagaaaattgaatctaagtctgatcttgaaagaactgatttgaacaaagataaaactggtgtcttcactggtgcctatgcaattaacccagttaatggcaaggaagtgccagtttggatttctgactacgttttagctagctacggcactggtgcagttatggctgttccagctcatgatgatcgtgactatgcttttgctactaagtttggtttgccagttaacccagttattgaaggtggcgatattgaaaaggaagccttcacaggtaatggcaagcacttcaattctgagttcttagacggcttggataatgaagaagctaaaaagcgcatgattgaatggcttgaagaccataactgtggtaagaagaaggttaactacaagttgcgtgactgggacttcagccgtcaacgttactggggtgaaccaattccagttattcactgggaagatggaaccacttcattagttccggaagatcaattaccacttcgcttgccacatgcaactgacattaagccatctggtaccccggaaagtccacttgctgacttgactgactgggtaaatgttgttgacgaaaacggtagaaaaggtaagcgtgaaaccaacacgatgcctaactgggctggttctagctggtactacttgcgttacgttgatccacataatgataaggaattagctgactacgatttgcttaaaaagtggcttccagttgatctttacatcggtggtgcggaacacgctgtgcgtcaccttctttatgcaagattctggcacaaggttctttacgatttgggtgttgtgccaactaaggaaccattccagaagctttacaaccaaggcttaatcttgaagaatcacgaaaagatgtctaagtctaagggtaatgtagttaaccctgatgaggtgatcgatgaatatggtgcagattcacttagaatgtacgaaatgttcatgggtccacttgatgcatcaattgactgggatgacaatggtcctgcttcaactaagaagttcttggaccgtgtgtggcgcctctttgtaaacgatcttgatttgaaggccattccacaagaaagaatcgttgataagaatgatggtgaacttgacaaggtttatgcagaaacagtcaagaaggtaactgaagactttgaatcattacactttaacactgcaattagtcaaatgatggtcttcatgaatgctgctcaaaaggctaagaccattccacgggaatacgcagaaggctttgttaagcttttagctccagtggctccacatatgatggaagaaatttggcaagtctttggtcatgatgaatcaattacttacgctaagtggccaacttatgatccagctaagttagttgagtcaactgtagaaattatggttcaagttaacggtaagcttcgtggtaagttccaagctcctaaagacgctgcaaaagatgacttgcaaaagcaagcaatggaaattgaacacgtaaagaagttcttggaaggcaaggacgttaagaaagttatcgttgtgccaaacaagattgtcaatattgttgctaaataagttagattttcctaaaaaataataagaatacttattatttagatttattgaattgattagttgagacttttattgggaaaattttaatggaagaaaataacttaaatagcaaagatacacaaaatacttttctaaaaggttccgcatggatgacctttggctcaattgcctcgagaattttgggtgctttgtatattattccgtggtatgcctggatgggctcctacggcaatattgccaatgctttgactgcgcgtagttataacatttatacaatttttatcttaatctcgacagccggaattccaggagcaattgctaagcaggtagctaagtataatgcactaaacgaatatgggattggccgcaaattatttcgcaaaggcttaattttaatgaccgttttgggtattgtctcagctgcgatcatgtattttgcttcgccgcttttagcttcaaatgggagtcaaagtgatccaagacaggttgcagttatgcgtagcttgtcttatgcgattttaattattccaattttgagtatcatgcgaggctatttccaaggttatgccgatatgatgccaagtgcgatgtcacagtttgttgaacagtttgcccgggtagtctggatgttgctaacggcgtttgtaattatgaaactgcaacatggttcatatgttcatgcagttattcagtcaaacttagcggctgcagttggtgctttatttggaattggcttattaatttggtttttgttttctagaagaaaacaactagattatttggttgcccattctaataatcgcttgcgggtctcaacgactgaattatttggtgaaattattgcacaagcaattcctttcattattattgattcaggaattaccttattttcattggttgaccaatataccttccacccgatgattgccagtctagttcatgctagttcagatacaattgaggactggtatgccttgtttggtttgaatgctaataagttaatcatgattattgtttcgctggccagtgcaatggcggtaaccgcgattccacttttatcagcggcgcatactaggggagactataagagcatttcaaagcagattgctaatacgatggacctatttttatttgtaatgattccagctgcttttgggatggcagccatcagtaggccaatttatacagttttctatggtccagatctattggggagcaacgtactatatctgtcgtcatttaccgcgattagtttaggattatttacggtgctgatggcgattttgcaaggtctttcgggaaatggactggctatcaagtacctggttttaggattgattttaaaagggatcctgcaatatccaatgattttcctatttaaggtatacggtccgctggttgctactaatttaggtttattaattattgtggcactttctttaaaacatttggaagtgcagtatgattttaatttgaatcgaactagtagaaggctggctggagttacagcattttcagttggcatgttccttgtggttaaattatgtgaaatgggactaggcaagtttctcaatcctgatcatagatttaatgcattggtgctagtgattgtagctgtaggtgctggggttgtcttttatggcttggtgacattgaagacagggttagtccaaagcgtcttaggtagtaaggtagaaagtattttagttagactacatatggataaataaaagaaaattgcggctctttgtcaaatcttactgataaggtgtcaagtctaatttttcctggtagttgagtaaatttttggccgggggatggcttacttgagtaagtttttgtgcaatttctaagtgaatcaaccctaattgtcaaaaaactgccactccctcttgcaaagacgataattagtgttattatataatgcataagaaacgcaagaaatgtgtataaaaacaattatttttagcaaaggaggcaaaaagcatgattaatctgactgttaatacaatcaggcttagcggtgtcgctgcaagagcaaaccgcgtcatgttttaactgtcctttagacaaagtgaatcaaagataatttaacagcacagtattaagtacacccggtttatcggcggcatcgttaactgaagattttttgttatgcgtgttagctaatgaggtattaagatgaacaagggtaagactttaatgactggtgctgttatttttatgtgcgggagcatgctggcggcctgcggcaagagccaaggagcatctgtcaagcagaatttaaactggatgaccagtgcgaaaatcatcaccatggacccatccaaagccaccgacaccacgtccttccagcagattgaaaatacgactgaagggctctaccagctgggcaaagacagcaagccggttaaggtactggtcaagaagacgactgtcagcaaagacggtctgacctggacttttgaccttaagaaggggactaaatggtctaatggcgaaaccgtaactgccaaggactttgtctattcctggaagcggacggtgaaccccaagacagctagccaatacagctacattttctctgggattaaaaatgccgaccagatcgttgctggtaaaaagaaggccgatacgctgggcgtgaaagccgctggcaaatacaagctgcaggttagtctggaacataagattccatacttcaagcttttgatggccttctcagtctttttcccagaaaaccagaccgcagttgaaaagtatggctcaaagtacggtacgtcatcaaaaacgaccgtttataacgggccattcttgcaaaagggctggacgggctccaacttgtcctggaccatgttcaagaacaagaactactggaacgccaaagccgttaagctgcaaagcatccactttgccgtggaaaaatctccgtcaacggcctactacctctaccaagatggcaagctggacacggcaagcctgagctcacaagcctccaagaacctgcaaaagtcaccagactatgttgtaagaaagaccaacgggacgacttacttccaatttaacctgaaaatgaagaagttccagagcaccaagatgcgtcaagccatctccatggccctagacagaaacgtcttagccaagaccttgggcggcggctacacgggctctaagaactttacggcagctggcatgaccaaggtgggtgacaaggattttaccgacctctctcaaaccaaggaaagcttgctagtaacgggccaccacaagcagctggcccaaagctactttaaggaaaggttgaaggaacttggcttaaagaagctgtcctttacggtgattacggcacacgtccaagtccatcggcgaatacttccagagtgctcttgaatcaacttttggcaagcaaatcgacgtcaaggtgcaaagcctgccaaccaagtcccaatttgccaagatggactctggtaactttgaagccacgatcagcggctggaatgcggactttgccgaccaaatttccttcctggactgcatgacctctactaatggctacaactcaggcaagtggatgaagctgctggcaaaggctgaaaacaccttgctggttgatcagcggctcttactacttcgaacacgtctacattgccaagtaagccagtaaaaaatgtattatcatgctaggtattatgtagtagaaagtgaagaataaagcgtaaattgctataattaagatagaaataagggaaaatcttaattagtgaaggagcgaaagataatgaaagactcaaattcaccaatttacaacatttggatggtggttctgctggttgccgcatatgtctggccaatctttggcttagcaccagccatctacctctttatcaagcgcaaggatgagaatctggtccctttgaagaattggattactctagccttgatctggcagattgttttgtggctgctcttgattttggttgtcgtctccttctgggtcggcgcctttgcggtcaaccacggttaactaaataactaattgaatagctagataaaagtcagtggatgccactggctttttgtctgcttaagcaaatgtcataactatatcactatttatagccttgaatagatttaatcggttacataatgcatcacgcaggtgatatctcacaaaaaattaacaaaagcatcaggttcaaagattgttaagccgatgttaaatagaactagcaagggtgaaagcggtacatttttttctttgttaagctaatgtaaactaagaaaaataacgttagaatattaaccgattttcgaaaaatggtaaagatttttccaaaatccggccagaatttaaacaaagttaagtattttactttgatttaacatttccccctgaatgtatttaacctccattaattactatttacttagtaagaattcaaggaggataattatgttaggcaagaaaactagagtagtggttatcgcacttgctctactggctatagtcgtcggctgcgttgttggcagttcaaaggcagacaccaagggtgtctctgggactgttaacgctgcggggtcttcagccctgttgccgctagtccaaagcgcagctaaatcattcatggatgaaaatccagacagcgtgatcaacaccaacggtggtgggtcaggccaaggtttacaacaagtctcagatggaaccatcgacatcggtgactctgacttgttcgcagaagaaaaattagacaagaagtccgcatccaagctggttgaccaccaagtggccatcaccgcgattgccccaatcgtcaacaaggacgccggggttaagagcttaaccacccagcaattgatcgatgtttacactggcaaggttaccaactggaaccaagttggcggcaatgactgcaagattgttttgatctcacgtcctgcttcttcaggtacccgggcaacttttgaacaatatgctttaaacaagactgccagtcgttcaaaccaatcactggaaactgacgactccggtactttgatccaaatgattcaaagcgttgaaggggctgtcggctacgttgccttatcatacttgactggtaacccagacgtaactgcagttgccatcaacggcgttaagccaactctggacaacgtttacaacggctcatacaaggtttggaactacgagcacatgtacaccaagggtcaaccaaagaaggctgctgttaaggcctttttaaagaagatgttaagtaaagaatacgaatcaaaggttgaaggcatgggctacggtgttgcttctaagctttcagacaaggctaagaaagaacacaagtaaaaggagagtgatttttcatggacaaggtagttcaaaaagccatcgctagcgataagcgctggcgggcagtatacattgcttgcgggctcttgattgttgctttgacgctcttgatgggggcattcctgctctaccaaggtagtcaaacctttatcaaggctcaccacagcatctgggaattcctgtttaccagcgactgggcaccgcttgacaagaccggcctgtttggcgggaaagtcggtgcagcagtttacatcgtaggttctcttgaaacctgtttgctggccctggttatctgcttgccatttgctatcggctcagcagtttacatgacggaaatctcaccaaagatcggtgaaaagtacttccgtccagctacggaaatctacgtttcaattccatccgttgtttatggttggtttgggatgaccaagctggttccattgattaaaaatattttccatccagccatgggtgggtactcagttttggccgcatccattgttttggccatcatgatcttcccaaccatcaccgcggtttccgctgacgccattaagtcagtgccaatgagctaccgtgaaggtgcttacggtttaggcgcaacccgctggcaagtaatcggcaaagttgttttgccagcagcttcagggggcatcttgaccggggtgatccttggcttggccagagcgatcggtgaagccttagccgtagccatggttatcggtaagactcgctcatttgcggcaaaccttttgtcaccaaccagcaacttgacgagtgccatcgcagccgacatgggtaacactgcccaaggcggggaatacaacctggctctgtggaccatggcgctgctcttgttcatcatctcaattgtcttgattgtgctcattcacaaactggctaacggaaagaaggataaataatgaaccgtgctaagaaaaaagatcggtttatgaccggcgtcttttacgccatcggctggctgatgctagcattcttgctgtatttgacatttaccattatctttgatggcttgaagggctttagcccagacttcttaggggctgccggcaacgggatcttcaaccaattctttaacactctttacttagttttcctttcgctcttagtttccgtgccaatcgggatcggggctggggtttacctggctgaatacgccaaggaaggcaagctcttgaccatgctggaagtaagtatcgaatcactttcttctctgccatccatcgtaatcggtttgttcggctacctggccttcatcatgtggacgggaatgagctggaacatcgtggccggggccttgacgatctcaattttgtcaattcctttgatcactactgaaaccaacaatgcaattcgtgccttgccaattgaatacaaggaaggttctctaggtttaggtgcaaccaagtcagaaaccattagaaaagtcttgattccagctgctatgccgcaaatcttgactggggtcatcatggccgctgggcgtgggtttggtgaagccgccgctttgctgtacacgtctggtcaatccacttacatcaactggcacaacttctggaagattacttcacctacttcacctttgaatccattcagaagtggtgaaactctttcactgcacatctgggtcatgagaactgaaggggctttgaaccctaaggcaacccaaattgccaactttacttcagctgttttagtagtactcgcactgctctttactttagttacctgccgcatttcagacaagatgcgtaagcgcaataacggaggaaattaataatggaagacaaaattactatcgaaaacttgaacctttactacagtgatttccacgccttgcatgaccttaacatgcacattccaaagaatgaaatcacggctttcatcgggccatctggttgtggtaagtctactttgcttcgctgcttgaaccggatgaacgacctggttgaaggctgccggattgacggttcagttaagttagatggtaccgacatttatggcaatgaccttgacgtcactgttttgagacagagagtcggcatggtcttccaaagaccaaatccattcccaatgagcgtttacgacaacgttgcttacggtcccaagatccacggcgtaaccgacaagcaagaacttgacgaaatcgttgaaacctcattaaagcaagctgctatctgggatgacttgaaggaccgtttgaacaagtctgctttgggtctgtctggtggtcagcaacaacgtctttgcatcgctcgtgccttggctgttaagccagaagtcttgctgatggacgaaccaaccagtgcccttgacccaatttcaacttcaaagattgaagaattggctctgcaactgaagaaggactacaccatcgttatcgttacccacaacatgcaacaagccgtgagaatttctgacaagactggcttcttcttgctgggtgacctggtagaattcggtgaaactgaccaactcttctccatgcctaaggatgaaagaactgaaagatacattactggtcgtttcggttaaagaccagtaataattagatagagtaagaaaggcagaaacaatgactagatcaagatttgatgaagaattggacaacttgcaaaagtccatggaagacatcggcaagctgtgccaggaagccattttggaagcaaccaacaccttgtttacgggcgactaccatgaagctgaagactcagtcaacttgcaccgccgcatccacaagagcgaacggaaaattgaagacagctgcttgcgcctgttgatggagcagcagccagttgcgactgacttgcgggtgatcagttcttctttgaaggccgtttacgacctggaaagaattggggaaatctctgctgatattgcagaactcgtgttaaatgaacacctgtccatcgccaatgaccagctgaaccttaagtccatggtgcaaacctcaaccagcatggttgatgatgccgtaaccgccttgtccaccaagaatctggaactggcgcaagcggttatcgaccgcgacgacattgttgacgatgactttgaccatgcccgagaaatcctgatcaacaacttcagcaaggatggcaatccagaatacctgatcaacctgatgatggttgccaagtacttggaaaagatcggtgaccacgcggtcaacgttgctaagtggaccaagtttgtggcaactggcaaggccggaagataagtcttggaaagtttgctaaattaatattcttcctgatctatctgcatagcaaatgtttctaagctataattagagtagctatttgcagatagattagggagaatttttttatgactgaaatatggtgtgtggaagacgacgaaagcattcgcaaaatcgaaatgtatacgctggagtcgatgaactttaaggtgcgtggctttgaagacgggacgacttttgtcaaggccctggcggaaaagcatccagatctggtcatcttggacctgatgctgccagatgaagatgggagcgatattttgaaaaagctccgtggcaactcgtcaactgaagaattgccggtgatcatcgctagtgctaagacagccgaatatgacaaggtgaagaacctggattctggggctgacgattacttgaccaagccttttggcatgatggaaatggtctcccgggtcaaggcggtcctgcgccggaccaaccacaagaaagaagacaagatcgagaaagacgggatcaagatcctgctcaagcggcatgaggtttatgtcgatggtcaggaaatcgagctgaccttgaaagagtacggcctcttgaagctcttgatcacccatccagggaccgttttttcccgagaagaaattatggatcaaatttgggaaacgggcttttacggtgaaacgcgcacggtggacgttcacgtaagaaccttgagacaaacattgagtgaggctggtagccatatcgaaacggtgcgcggggtcggttatcgctaccatgaagggaattaatgtttaaaaaaatatttcgggcagtctttttatcaacggcagtcatgctggtctgctcggtggttttgagtgcgctttttttaggcatcgactatgatcacaatgaggtcaacaccttggcttcgcaggccgatttggcagccagcggggtcaacaatgggggaaggaagtacttaacccagctaaaaggagaaaattaccagattacctggatcgatgctaaaggcaaggtactctacgacaacgaggaaaacccagccaagatgggcaaccacgctaagcgcaaagaagttgctgaagccatgaaaaagggcgaagggcaaagcgagcgctacagcacgaccctgtcgacggttacgatgtactatgccaaaaagctgaaagacggcggcgttattcgggtggcggttacgcggaattcgatctggatgaccatcttgcaattgctgacgctgatgctgatcatcttgctgatcgccgtgattgcttcttggttcgtagctaagatgatctcgcagtccatcgtcaagccgctgaaccagttagacctggaccagccgcttgaaagcaagagctatgaagaaatcaagccgctgttaacccggcttgacagtcaaaacaagcagattgctgaccaaatggagcagctccaccaccgggagaaggagttcaagacggtcaccgatgccatgcaagaaggcctgatcttgatagacctgaacgaccaggtcctcttgtccaatccggcggtagtatcgctcttaggatcaaagtcttctgaagttttgccagatgatgttaaaaagatcatcgatcaagacaagcggaccgtctacaccgaagggatcgtggaaagagaagggcgcaacattcaaattagtgccagtccgattttttcacggaaggtcttaaaagggacttcgatcttggtcgttgacgtcacagaagaataccatgaagagcaggtccggcgcgaattcacggccaatgtgtcccatgaattgaagacgccgctgcagtccatcatggggtcagcggagcttttggaaaacaacctggtcaaggaagacgatcggccagccttttaccggaagatccatgaatcttcagctcagctcttgaccttgatcgatgacattatccggctgtctcacctggacgaaaatccggaatttgaagaggtccggatgaacctgaagagtccggtgaccgaggcgatcgaagccttgcaggcgtcagctgacaagcacgagattgagctgaaggcggctttggccgatacagaaatcaaggccaacttccgcttggtttatgaaattgcctacaacctgatcgacaacgccattcgctacaacaatcctggcggccaggtcaagattgcggtcaaggaagtgcgggggcaagctattttgcgggtttctgacacggggatcgggattccgcttgaagcgcaaaaccgcatctttgaacggttctaccgagtcgacaagtcccacaaccgcaagactggcgggacgggacttggtctgtccatcgtcaagcacgcagtacagcagtgccatgggacgatccgccttgaaagtgaactgggcaagggctcaacctttaccgtggtcttcccagctttaaagcatgaagacaaattatacagccaaaattgcttatttgatctatgataaaggtgtcgaaagaaaataagagctctatttaaataacatagacataatcatgggctaagtgtatataaagtgtaatttagaactatacaatatatacgtaaaatcttatgattaaaggtgaacagatattatagccactttttttaggattcgattaatgtaaaaattacacaatgaattaataaaaagcgccatataataagcaaaaaaagtcatttaaataactaaaataaactgagacctaaaagttgagactgtaaaatagtttgtgtaaggatgaatgattccttaaatttatttctttaaacattagaaaaaggagttcctttctcgtatgattggtttgaacaaaaaaaacacatacagaaagaagaactccttcatgaatgattttaccaaagattttgctcaagctctattcaatccagacaaaataaatgatttattgcgcaaagaactacaacaggctgttaataacttgctagaagctgaattgactgcctttctgggctatgatccctatgccagaaatggctggaatactggcaactctagaaatggtgcttatttccgcaaagttgatacgcaatttggcccaattgaagtgcaagtgcctcgggatcgcaacggtcaatttcatcagcacacgctgcctgactacaagcagcactcggatatcttggaaagcatgattatcaagctttactccaagggcgtgaccaccagggaaatagccgatctaattgaaaagatgtatggcagccattacagtccagctcaggtatcaaatatttccaagcagatgattccaaaggttgaggcttaccacaaacgcaagctaagcgacaagtttttctgcgtctatttggatgcgacataccttcctttgcgccgagaaacgtttgagcgtgaagcagtctatattgccattggcattaaacctaatggacataaggaagtcattgactactgcattgctcctagtgagaacattgaagtctggacagagatgcttcaaaacatgaagtccagaggcttgaagcaagttgaactctttctttctgatggtgttgttggcatgaaaacagccttggccaggacttatcctaaagctcattttcaacgctgtttggttcatgtcatgcgcaatatctgcgctaaagtacgcgtcgacgatcgtgaaaagatcatgaacgaattcaaacaggtgcatcaacagacaaacaaagaagaagccacagctgtcctgcatgacttctataccaaatggggcaaggtttacagccatgttatcagaagcttgaaagacatagaaccagatctgctggtcttttataactatcccaagcagatcagagcttcaatttattcgactaacatgattgaatcatttaacaatgtgatcaagcgcaaagctaagcctaaggcagagtttccaactgaacagtcgcttgatgcatttattggcatccaggcaatgagctacaatgaccgttatttcaatcgaattcataaatgctttggtcaggttcaggacaccttagaatcctactttgattaaataaataattaaaaaatcaatttacgagaaagaactatttacacaaaagatttgacagtttctaaaagttagacacttttaggtctttttctacgtaaagtcaagcataataagaagtttggcttcattttttgtttaaatttcaacttaaacatcttttagtgtcgatttatttttttagttagacacgacaaataagcccagatccatatctgatttttgggcttagcgttataatgtacttgatcaattaattacgactaaagtctttttgattatgtgtggctacgttgtaatcatatggttgatcattgataatcagggcataaatggttctgattagtttatgaattgaagcaatagctatctttttgaaccctttggtttgagaggatagctttttgctttcataataatctgctatatgacacggatttgtcttagctgcattatcaatttgtccaatagctcgataaagcaacttacgtgcgactgcattgccatgtttagtaatacttaaattagagtccatttctcctgactgatatctgcctggatcaattccgataaaagcattgattttattaggattactaaatctgcgtaaatctcctaactctgctaaaactctgacagcagtggtctgtgcaaagcctggaatgctttctaggttttctaaatcatgattgggaaaagacttcgctaacttaaccattcttgcgattaaattttctctttgatcacttaaattaagcaatctgtgtgcataatactgcacttgctcgacttctatgctagagcaagatacaactggataagcttgataagctaattcaattaatttatctgcagtccttagagcgtgtttaaaagcaatcccctttaagctcattaaccagttaataagctgttttttatcttctcttcttactaagtcacaatgaggatatcgcacaactatttgccagtaatttttacctttagcagaagaaaatagattttcaatttcaggaaaagtcgattgtagagcttggtgaagtcgatttttagctattaccaagtcacttgtcagctggtcatagaagcggctcaaagcattaagctgcttataagtttgggattcgctttgattaaccggatggcgataaagtctttgaattaaagctaaatgataagcatcagttttatcggtcttgttgtagcgtagccccatattcatctcttttttggctttaagcggattaataacaacatattcatagccgtagtcttcaagaaaagcctgcagtctgcgtgaataaacaccggtagcttcaaaaataatttgcggatgtttagaaaaagcggttaattcatgaagcaattgaataaaaccaggacgattattagtaatggttagttcatttttgctttcaccaattagttcacaaacagtagaagtagacttgcttacatcaattccaaaagtaacttgcataataaaaacctccaaaacttagtagtaaaacgtatttacttaagaaatcagatctaattttctaaaatcgacatctagtgtccacattcttcgaagagactattgaaaacttaagtaaaactgccagtttattatgcgacatcaagtgtctaaagacctcagggcatatcgttttaccactactttaattctacaaaagaataaaaatagtgaatcaattatcccgtcggataactaattcactatttagcttagaatgtttactatgtctaaatttaataaagaacaaaaaatagaaatttatcataaatggaaagatgaaaatatctcaatcagtcaattggctaaagcgtacagaatgaatctagctaatttagactatatgcttagattaattgatatgcatggaatagaaattttaactactaaaaaccaaagctattccaaagagtttaagcagcgaactattgaacaagcaatctttggcaataaaccatacttacagctgtctttggaactggggtttaaaagtattggcatgcttaacaattggattagagaatataagaaaaacgggtataatgtcattatcaaacagaaaggacgccctgcccgtgaccaaagaaaagcagaaatctcgcaagaaactggagaaagagatccagcagctgaaagaagaaaacttgcgattgcgtattgtgaacgaatacgtaaaaaaactaagtgccttggaccaagaagatcagaagaaatagctagggtgattacggatctaaggcaagaattcaaagttagtttaaattatgtattagctgcgattgcagagcaccctgagctacctataattgccagaagctcatactacaagattatcaaacgacagcccgtcaagcctaaacggtcaaagcttattgctagaatccatgagatttttaatcatcatcaaggccgctatggatatcgcagagtagctttgcagttaatcagagagggctggaaagttacggagaaaaccgttcgctattggatgcataaattaggtcttaaaggcatcaggcgcaataagcgcaaatattcaagctataaaggtactattggcaaaatagctccaaatttaattcatcgtgatttcttcgcagccctgcctaacacaaaatggtatactgatatcactgaatttcatcttaataatgaaaagctttacttatcgcctattctagacggctgcggtggcgatatagtttcttatactatctccaaacatccagatatggatttagtaatgacaatgcttgacaaggcttttgccaaagaaacagctcttaataactgcatttttcatactgatcagggctgtcagtatcaaagccctcgttatcagcgagctttaaaactccatggtattactcaaagcatgtccagaaagggcaactccatggatgatgggctaatggagaacttctttggcctgctcaaaactgaaatgttctatgatcaagaatacaagtatcataatcttcaagaattaactcaagcaatcgaggaatatatcgaatactataacaacgaaaggataaagagcagattaaaaggcttaaccccgaaagagtatcgaagtcaagcctctattaatccaatattttaattgtctactttttacgtctcagtacaaaaattatagagccggttttttagtactgttttaattctatcatgattgtagtaatgaatgtattccttgattgcttgttctaattcacccatggttttgaatgtcttttcaaagccatagaacatttttcgtttaagaatgccaaagaagccctccattaagccatcatctaatgaatttcctttacgtgacatagactgggaaacaccatgatttttaagccaagcttggaaaacagcgtgctgatattgccagccctgatcagtatgaaaaattaacccattgagtgcaggatgcttttgataagcttgatccagcatgtccattacttgttttagtaccggatgacgatttaatgtataagcaacaatctcttgcgtacatccatccataataggcgacagataaagcttctctccattaaggtgaaattcagtaatatctgagtaccaatgtctatcaggaataattgctttaaaatttcgtttaattaaattgggcttgatttttccaacagtccctttgtagcttgaatatttaaatctgcgtctaattgcaatggcatatagatgcatcttggtcattaatcgtttaacacgtttatgattaactataatgccttcacgtcgcaattgggcagtaattctacgatagccatatctatgcttgtgctcctcaaatatttctttgatccgttccataatcttttcgttttttaaatctttatcatctttagttaaagtgtagtaataattactgcgtgataaatgcggaagatcaggattggagttaatcgtatcaagcacaaacttaacggttacgtggagttcttgccttagttgcgtaaccgcagaaactatctcttgtgctgttggttttcggttcttggggagactaaggcgctcaatttttttacaaattcgttctcgacagtaagtcttaagttcttctgtttgaggtcttttatttgcttctgaagctcttgaatctgtttgtctttgtccttcatgggtaggtctgcctttcttgtgattaatgacattatacccgtcttctttatatttgcgaatccaattgtgaagcataccttggctgggcagtcctaaatccaatgatacctgacgagccgtttcatgatcataaataactcttttgatggctttctctttaaattcaactgagtaatctttatagctattatcaagaatttctatcccatgacgttctattaaggcaatcagataaaacaaatttgtacgatttaccccatattccttagcagctaggttagctgatatattataatttttccaattattgtaaatatcaattttgtcttgtttggataatttagtcataataaaaacctcgaaattcttgtccgaatttcggggttcatatcatttgtttctgtagtgccttttttataaatatcaataaattttaggagtgtaataagattttagaattaattatgttcaactgctgttaacgtaatgactccaattaattcaagtgccaaaaatgtaattccaaggatagtaatcatagtgcccatctccttatctaggagataaataattagaatatttatcttttaattcaatcattgcttacactgttactgtaccacataattgcgtattatgaaagcgattacattaaattgggagaaaaaagttgacctccgaagaaatcaacttgtgcccctgccaaggacctatattatagcattcatttattctgcatgatcatcctttttctcagttgagtcaggattttgatcgtcagacttggtgaagtcaccattcatggtattaggacgaccagtttgataatcaactgtgtgcttttcagccttaggtgcgctttgaccaggttcaggcataaccatagcagcaataatatataaggcaacgccaggaaatacacctgtgaataatatcaatgcagcaccgatgattctaacccaagcaggatctagatcaaagtagttagcaataccgcccaaaacgccagctaaaattttattttgtgattttgtaagtcttttttgcatgataatcaactcgtttctaactgttctatctcttttacatatattatacagcaaaggcatgaaaaaagtgttgattgctcaacacttacacataattatgatgcccgctaaaagattcgaactttcactcagtcacctgaacagcgacctgaacgctgcgcgtctgccaattccgccaagcgggcaattttctttggtacatgaataatcataccaaatatttggtaaaatgtaagcataaaatactttaattataaaaaaggatggaaattcatgttttttagcaaaaaaataaaacgtgcagcaattaccacgattgctgcagtatcaattttttcttgtggtgcggtatttgcaactataccagttagcgcagatacaactagtagctatcaagctgatcaagttaaactaaatgtaaagtcagcaattgcaattgatagtgattcaggtcaaattttgtatgccaaaaatgcgactaaaactttgccaattgcttcgatgactaaattagtaacagtttatttaactctgcaagcaataaaaaatcataagctttcatgggatcagaaagtaaagccaacggctccgatagtaaaggtagctaataatgcagaatattcgaatgtaccattaaaactaggacattcgtatacgataagacaactttatcaagcaaccttaattgaatcagctaatggtgctgctatgctgcttggtcaaacaattgctggctcacaaaaggcatttatcgatcaaatgcgagctcaagtaaaaaagtgggggattgaagatgccaagatttatactgcttgtggtttacctaatggcaatttaggtaaagatgcatatcctggtgtaaataaaaatgctgaaaatacgatgtcagctaaggatatggctattgtcggtcaaaaattaatctcggcattcccagaagtattagaaactacacgcttagctcacttaaactttaaagatgctggtcacgtaactaagatggctaactttaactggatgttaaaggggctttctcaatatgatcaagcttatccagttgatggcttaaagacggggactactgatgctgcaggggcttgttttatcggaactgtacaacacaatggtgctcgtttactgactgtagtaatgggcgcacgtcaccgtgacggaacggatccagctagatttgaacaaactaaaaagttaatgaattatgtttttaccaagtatcgtcctgtaacaatgactgctggtagccaaatgaatggcgctaagacaattaaagttgttgatggtgataatgcaactactaatttaggacttaagcaaaagactactatctgggatccagctgatggcaaaactttagtggcatcattgaataaaaaatctgtagaagcaccaattaagaaagatcaaacagttggtgattatcaatttaaatctggtaatgaaaagattgtttcattgtctaatcctaatgggatgaacgtcaaggctaaggcattgtcagctaataacaaggtgaacttttttgtcagaatttggcgctggattttcggaggaagataaatatgactgaaatttctgaagatatcttgaaaaaggtaattaaagaaagagaaagcgatacacataaaggcgattacggtcgtgtactcttgatcggtggtagtgagaactatggtggcgctattattatgtctaccgaaggcgctattaatgctggcacaggtttgactgctgttgcaacacaccctttgaatttagcaccgttacatgcacgagtgcctgaagcaatgtttatcaactggcgcgatgctaagttagcagatttaatcaaaaatatggatgttgtagtttgcgggccaggattaggcatgagtgatctcgctaagcaaattttagttatcttgcgaagatgtacttcagaaaaacaaaccgttgtcttagatgccagtgctcttgatttaattagtcaggataagaacttattgccaactaatgctggccacttaatcttgacgccgcatcaaatggaatggcaacgattgagtcaaattcgtattccgtttcaaacagatagtgccagtattgatgctttaaaccaattgattccagatactaatgcgcttttagtactcaaatcgaatcatactcatgtttataatgggactggtcaaatttttgttaatccaattggcaatccaggcatggccactggtggaatgggtgatactttagcaggaatcatcggtgggatggttgctcaatttggcccaggcgttgaaaccgttcaagctgctgtctatcttcattctttagcaggtgacttgcttgccaaagataattatgtggtacgaccaacggaactttctaaagtattgcctaaattgatgaaaaagtattcagaattggcataaacatgttaaaattctaatagtaaataaatgcatccctagttgagggatgttttttaacgcttcaaagacgaaaaagcataatataattgagttaaatattaataaaaaagaagattaacatatttatgaaaaaaaacattattatcggcgtaactagtatcgttctagcttttggtgcaattatcggcttagctaaggtatgcgcacctaagtctgatgtctcacaagaagctgctacaacgcagactaaggccaaaactaagaaaataaataaaactaagaaaaaacaaactaaaaaagtagataatggtgctttatatcgaccatatagcgatcctaaggacttgcgcaaggcaggcacttggaagaaaaagagtgagcctaaaaaatatcctaagattaagccatatgaaaaggatttgactttgcgggtatcattaaaaggaaaccggacctatttgttaagaaaaggcaaggttttgtataccatgttatcaactggtggaatctacaagaagggcaagtcattgaccccaactggaacttttaggatccaaaatggtcgtggagacagctttttcaattataacttaggtgaaggagctaataattggactagttggagtcctgataacgtgtacttgttccactctgtgccaactaaagctgattatagctataacttaaaagaagcagtcaaattgggaagaactcaaggttcacatggttgtatccgtttgagtgtacctgattctaagtggattatggatcacatcccagatggtacgaaggtaatcattaaaaataattaacaagaacgttgctttttaagcaacgttttttaaaaaattgcagtaaaaaactttgttcaaagcgttcaagattttaatccaactcaagaatggtttttttaaccaaattagtggcagaagccgttttttcctgctataatcatgtttgccaagaagtcaaaagtagtagttattttctttttaagcgagtctatgttggtgcaagatagatactagaagataatgaaggcgtgtttgactgataaaatcaagaatttaaataagcggatactttgtatcaatctgagtggtaccgcgggtttttaactcgtctctttctacatttgtagaaggagacttttttatttagaagagaggaataagatggactttaagaatgaagtagttgacttggttgctagtcaagttgatttacctaaagaaaaaattgctgcattaattgaacgccctaaaaatgctaagatgggagactatgctttcccagcatttattttggctaagactttgcacaaaaatcctgcagaaattgctaaaaatattgcggataacttatcaagtgataatttcgctaatatccaagcagtcggtccttacgttaactttgcgattgaccatgaaaaattagtttcatcgactttgaaggatgttttgactgaaaaagaacattacggtgatcaaaagattggtgaaggaaatgtgccaattgatatgtctagtcctaacattgctaagccaatgtcaatgggccaccttcgttcaactgtaattggtaattcaattgctaagacaatggagaaggttggctatactcctgttaaaatcaattacttaggtgactatggtactcaatttggtaagttgattgctgcctacaagcactggggtaatgaagaagacgttaaaaaagatccgattatgaatcttttccactactatgtaaagttccaccaagaagctgagaaaaatcccgaacttgataatgaaggtcgtgaatggttcaagaaacttgaagacggggatccagaagcagttaaactatggaaatggttccgtgaggtttcattaaaagacttcaagcgaatttataaagaactaggcgtaacttttgattcatacaatggtgaagctttctttaacgataagatgcaaccagtaattgatgaattaaaagaaaaaggtcttcttcatgaatcacgtggtgcgcaagttgttgacatgggtgaaggtgaaaatcctgctattatcgttaaatctgatggtacttcaatttacttaactcgtgacctcgccgctgctgaatggagaatgaaagaatataacttcgttaagatgctttatgttgtaggtaacgagcaagcccaacactttgttgaattgaagactgttttgaaaaagatgggttatgactgggctgatgaaattcaccacgtaccatttggtttaatcacccaaggtggtaaaaagttatctactagaaaaggtaacgttgtcttcctcgatcaagtattaaaggatgctgtttcacttgctaaaaaacaaattcaagaaaagaatccagatttagcagatcaagatcaagttgctcatgatgttggtgttggtgccgttgtcttccacgatttgaagaatgatcgtttagacaattttgactttgacctagaagaagttgtgcgttttgaaggcgatactggtccttatgttcaatacactaatgctcgggcacaaagcgtcttacgtaaggctgctgcgatgggtgaaaatcctagcgaaactgatctagctcttgatgatgactgggcttttgccgtagccaaagatttagcagatttcccaagaattgtagctagaagtgccgaaaagtttgaaccttcagtaatagctaagtttgccttagatttagctaaaaaattcaataagtactatgctaatgtgaagattttaaccaaggacgataaaattggtgctcgtctcgccttagttcaagcaacatcaatcgttttaacggaatcacttagattgttaggtgtcaatgctcctaaagaaatgtaagagaaaaacaatgaaaataagaaaataacgcttacattctgtgaaaaattgttcatatttcaattattagggtacaataggcatgtaagatatttaggaggtattttttaatggcttattttgacaacggtaatcaaatctttaaagatgctcgtaagaaccattacgctgtaggtgcttacaacactaacaacttggaatggactcgtgcagaattacgtgctgctgaagaaactagaactccattgttgatccaagtatcaactggtgctgctaagtacatgggtggttacaagttcgttaaggacatggtagctgaccaaatggattcaatgaacatctcagttccagttatcttaaacttggaccacggtgactttgaatcagctaaggaatgtatcgctcttggttactcatcagttatgtttgatggtcacaagcttgatactgaagaaaacttagctaagactaaggaaatcatcaagttggctcacgaacgtggtatttcagttgaagctgaaattggtaagatcggtgaaaaccaaggtgctgatggtggtgaattagcatcagttgaagacgctaagagattcgttgctgctggtgttgacaagcttgcttgtggtattggtaacatccacggtgtttacccagaaggctggaagggcttgaactttgaccgtcttaaggaaattgctgaagcagttccaaatgaaccacttgtacttcacggtggttcaggtattcctgaagaccaagttaagaaggctatccaacttggtattgctaaggttaacattaacactgaattccaattggcattccaaaaggctactcgtgaatacatcgaagctggcaaggacttagacaagggtaacaagggttacgacccacgtaagttattgcttccaggtactgaagctattaccgatgctatgaaggaaatgatcggttggttaggtactaagactatcgatgacgaacttaaggatgcttcattcgaccgttcatcattaaacgaagaataatcatttgataattatttaaataaagtctagcgtttgctaggctttatttttttaggcaaatttggtgataacttaattgaacttattataaaagaaatataaaacctgaattgtcaaattaagtgcaacagttaggctatgaggaaatatattgcttgaagagttcttctgctgtgtgatattgaaggattcgacgatgtttgcggttaatggcatcagttgcctgttgaacataagcagctgacttatctttcatgcttttgcctttagggaagaattgacgcagaagtccattgcagttctcattggtgcctctttcccatggagaatatgggtgggcgaagtagatctggcagcctttgatcttggtcatatccgcaaactcagagccattgtcaaacgtgatcgatttaaaccaggcaggatgtctgtcaatctcattttgaagcagcctttggcatgtgcttgcccgatagtcaggaatcttgataactacttcaaagcgtgtggttctttcggtcaaagtcattaaagcaggctgattcttgcgtctgacgcctttaaccagatctccttcccagtgcagcggcgtttttctgtcttcaatctctttaggacgctgttcaatggaattgccaagatgcttcttgtgcaaagcatgaccgctatggccgtgatgacgcttgttcctgcgtcttttgagcttcataggcagatcaatattgcttatgtccagcaagccctgatcaatatagcgatagacagttggtgtgctgggacaagggtagcctggcatagtccttttgaattcaccaacgaattcatcgatgctggtggcatcaaatttagctttaaagcgtctggagagcattctcaaaaagacagcataatgcttcaatggattgcgctgatagcagtttttgcgacgcttctcataataaatctgtgcagtatcagcgtaatagtgctcatacaataaatagctgctgtctctttgcaggacacttccgcgtttgatttcgcgactgattgtcgacttatggcagccgacttcttgagcgataacagtacgggaagttatgccggaatccagcattgcttgaatttgtccacgttgtacgctggttaattgatgatagtgcttagaaatgctagaatttgaattggtcataaagatcttcctttcttgatttttcgtcacttcaagtttaggtcttcatggcctttttgtttaacacttagtgttgcacttcaattttaaatccgggaaagaaatataaaataaaaaattgaattataaagaaagtataaaaagagacttttatggaagcaaaaatgttaaatccatttatgcctaactttggtcgttttcctaaaattattatcgatcagcaagaagctttaactgattatttaactgggttgcaaacacatgatgctaagtatcaaacttctttagtttatgtcacaagaggatcaagaaaaacagttttccttttaaatgttcaaagatctttagaagagttagataattggatatttattcgtttaaataatggtcaaggagatttgctttttcaattaatgcatggtttgcaacgagttgcaggtatttcgttagttgacttgttaaaaagtgttaaaagtttgaatattatgggaaagggaattactgggcaagcactacaagaatcacagcaaattgattatgatgagtatatttcaattttgctaagtcgtttaaaaaagcagggtaagtcaattctaatcggaatagatgaaattgaaattagtgacgatgttcgggcttttggctcagaatatcaaacattgattggtgatgaataagatatttcattattgatgacaggattgccaagcagaatatccgaagtacagaatgaataataccctcacgtttttactatgtagtaatcgtgtttatttatcaccgttggatgaaaaaacaatagctaatagctatgagaaagcatttactaaaggaaaacgtgaaattgatttcatggtattggatgaaatgagccgtgcagttaaaggctatgcttatgcctttcaaacgattggttattatgcttggcgatttagtcgggaattattgcagttaaacgaagaagttttgaaacaaacaattcgagctgcaaaaaaggacctttttaggaatgcctatgaaagaatgtatatggatctttccaaaactgatcgcgattttatcgaagcaataatcaaagctggaaccgatcgtgtcacgacaaaacaattgcaagatatcttaaacaagcctattaattacatttcggtctatcgtgcaaggctgttagatgatcaattgattagagactgtaaaatagtttgtgtaaggatgaatgattccttaaatttatttctttaaacattagaaaaaggagttcctttctcgtatgattggtttgaacaaaaaaacacatacagaaagaagaactccttcatgaatgattttacccaaaatatggcacaagctctattcaatcaagacaaaataaacgatttattgcgcaaagaactccagcaagcagttaatgacttattagaggctgaactgactgcgtttttaggctatgatccttatgccagaaatggctggaatacaggcaattcacgcaatggtgcttattttcgcaaggttgatacgcaatttggcgagattgaaattcaggtgcctagggatcgaaacggcatgtttcatcagcacacgctccctgactacaagcagcactccaatgtcttggaaagcatgattatcaagctatattccaaaggcgtaaccactagagaaatagccgacttgattgaaaagatgtatggcagtcattacagcccagctcaggtatctaacatctccaagcagatgattccaaaagtcgaggcctatcatcagcgcaaactcagtgacaagttcttctgcgtttatttggacgctacctacattcctttgcgccgagaaacgtttgagcgtgaagcagtctatattgccattggcatcaagcctaatggtcacaaggaagtcatcgattaccgcattgctcccagcgaaaacgtcgagaattggacgggaatgcttcaagacatgaagtctcgcggtctagaacaggtttagctctttctttcagatggcgttgtgggcatgaagacagtgctggagcagacttatccgaaagctcattttcaacgctgtctagttcatgtcatgcgcaatatttgcgctaaagtatgcgtagatgatcgcgaaacgatcatgaatgaattcaagcaaattcatcaacagccaaataaggaagccgcgatcaaagtcttgcacgctttctataacaagtggaacagagcgtacaaccatgtcatcagaaatctcaaagagattgaacctgatctgctagtcttttacagctatcctaagcagatcagggcttcaatttactctaccaatatgatcgaatcctttaacaacgttatcaagcgtaaagctaagcctaaagcagagtttccaactgaacagtcgcttaatacttttattggcattcaggcaatgagctacaatgaccgttatttcaatcgaatccacaaaggctttgatcaggttcaggataccttagaatcctactttgattaaataaaagattaaaaaatcaatctacgagaaaaatctatttacacaaaaaatttgacagtttcattgattacatcccctcaaagaggagtagtacaattggcgttgccattttttgcagagtttgttgaaaaatctaatttagaacatttatcttagaaaatgagcaaatataataaattatggcaatatatcaaagataataaggctggggactttgagctttcttttgatgagcttggccagcaggctggggttgccttagatcattcctttttgcgttataaaaaagaattaccagcttatggctttgaggtgcaaaaaatttcattgaagaataaagtggtgaagtttcatcagttgtaatgaaagctattaataactaaagtagtagtttgcgataatatcttcaaaattagtaactatgttttgttttagaaaaagactaagatgtaagtaaaaaatgggaggattaataagttactatgaagaaggttttatcttggccagtatattatcaactatcagagatttatacggcgccattaaatgtaatttggtttgtctttggcgcggcaatgtcgtttcaacaatatcacatgtttaatttgattaacattttactgtgcttagtagatgtttttctgtttgatttagcagttaatattgctgataattactatgattatcttcatggcaaagatcgacattttttgactgatataaatccaattggtcgtctgaagttacctttaactgatgttagaaacttagtgtggattagttactttatttcggcgattccgggtattattttggtttatcgcaccggctggccagtactaataatgggagttgtaggatatttcattggaatattttacactgcgggtcctaagccactgaatgcaacaccgatctgtgaattagtggtatctttttttatttcgtatttcattatgctagtaagcatctatgtcacaatttacggcacttatcctttgacctggaacttagcattaactactctgataagatgtttgcctttaacactcattttctatgctttgcagttagctaataatacttgtgatttgcatgaagatttaaacaatgggcgccatactttagccagttatactggtaaaaaatatgctcttaaaataattaagacgttgattattgcgggattattatttccaattatcgttgttctttttggtttagcaaaatggccattgatctttagttgttttttgttgccaatattatggccaaaattaaaacaattttttgagcatccggataaacaaactacctatttacaaatgattaagtatttatcaacgcgtggtgctagttaaatcgttctagacaataagccaaattataagctaaaattgcaatttccaaccggctttgaaagcctatcagactacgtgctcgattgttctcggcattgtaataggtcagaagcgaaaagtcgctttcaattgttctgcgaatagccatcaattgatgatcattgtgctttttagctcctgtcatatttttacgatatggtgtccaaagttcataacccatttgttttagctgttgatgcagttctttgcctaaatagccttcgtcgccaagaagatagtaattagatggatgggtattttccagcagttcaactgtctccctggcatcatgaactgatgcttttgttacgacataatcaagaatgtaaccgtcatcgctaacaatgacatgaactttgaaaccatagaagtaaattttcttggtggccttataaccaatgttggcataaccgcgaaaaattttagcacgatagttgcgaattggttggcaaacaggtaccggaaagctgtcaatgatcaagaaatgtccattcaggtcaacctttttattcatttcttgccgtatctgataaatcaattgcaatagctgacgtgaacgtcgattaaaacgtgagtgtgataaacaattgaaacattcacagaatcttctttgtgattcaattcctgtcttagcttgccagataagtaaagccaaaatcagactgtccgtagttttaatttgatcaatatttcgccgatgagtaaactcagccggtgcatacaaacgataccagtgccgacaaattatcactaaatctttaaaactaacttgtaaatggtggctaaaacgcttaagcttaaggcagttcaatcagatcaggctcttttctattattatacaagttgagtctaacaagattggacttttttattaactaaaacgatttaactagcaccacgcgtatttatcaatatttttcattacatatatagctatttatacagttttggttttagtttagaggaaaattatggctttgaatatcatagatagaggattacactcattgataatgaggggggaaaataattatgtttggcaaaaagaaggataagaattcagaattttcaccagatattatgactttaaaaaatgcacttgaggaagtacgttttacgcccgaagttgagcatgacgcagaattaattaacatgtttgacgaagcaattgataaagccgagaagggtgaatctgttcaaacaatttatggtcgactcagttatcaaattacgcaatatattcaaacacatcatttcaaggcacccaagccagtaactgaattcttacatggaagtactggaagcgtagccacgggattgacttcagttccagtttcttggaatacagtacattaggaattttttatgtgcataaaattgacaaatactgaaaaataattgattaattaaacagagtagcaggtaatactactctgtctttttattgcaaatatgatgtcaaatgcgaaactgtaaaatagtttgtgtaaggatgaatatttccttaattttattttcctgaatattagaaaaaggaatccttttcccgtatgattgatttgaacgaaaaacatactagaaaagagattccttcatgaatgattttaccaaagatatggctaatgctctattcaatcaggataaaattaatgatttatttagacaaaagctccaacaggctgtcaatgacctgcttgaatccgaattgactgcctttttaggctacaatccttatgagcgcgatggctggaataccggaaattctagaaatggtgcttattaccgcaaggttgatacgcaattcggacaaatagaaatcaaagttcctagagacagaaacggtgagtttcatcaacacactatgccagattataaaaggcatactgatgttttagagcaaactgttatcaagctctattccaagggcgtcacaacccgagaaatcgctgatttgattgagaaaatgtatggcggctattattctccagctatggtttccaatatttctaaagaaatgattcccaaagttgaggcatatcatcagcgacatctgtcagataagttcttctgcgtttatctcgatgccacctatattcctcttaagcgggtcacttatgagcgcgaagcagtttatatcgccatcggtatcaaacctaatggtcataaagaagtgattgactactgtattgcgcctactgaaaatattgagatttggagcgaaatgctcaaaggcttcaagagtcgcggccttgaacaggtagagctcttcttgtctgacggagtagttggcatgaaagaggctatctgccagtcctatcctaaagcgcattttcaacgctgcttggtacacgtcatgcgtaatatcagtgccaaaatgcgggttgacgatcgaaaaaagcactggatgaattcaagcagattcatactcagtcaaacaaagaaatggctgtacaggtgctgcatgaattctatcaaaactgggaaaaagcctacaaaaacgtagttagagatcttagacaggttgagcctgatctgttaaccttttacaactatccgccagctattagagcttcaatttactcaactaacatgattgaatcctttaacaacaggcttaagcggaaaaccaagcctaaaacagaatttccaactgagcagtcgcttgacacctttattggagttcaggcaatggattacaatgaccgttactttaacaggattcataaaggatttgggcaagttcgagacaccctagaatcctattttgattaaaagataaataaaaaagtcaatcaacgagagagattatttacacaaacttcttgacagtctccaggattgcattactatagtttatgtaaattatgaataggtagtaagtaacttatgaatttcaagatattcattgatttaatgaggagaacgaaaatgaaaattttcaacaagaaaaacttattattgtcatctgcagttgttgcagggatgctattcacagttggtactaaggctgttcaagctgatacaaccgatagttcacaacaagcaactacaaatactttaaaggtaaatgcaaatactgcagttccagataagaatttgattacgccagtagctagccgtgataatcaaactcttcgtcaagttgcagaagcaaacaacacttcattaagtgtattggaaaagttgaatgataatattgatccagataaaaccattgctaatggcacgccattatatcttccacaaaatgaagatttgtcaggactatttggtatatatcttagatcagatacttcagttccaagctcattaaagagaaaatattatgatagtctttcagcaaaagagagagctgctaagatgtggattattgcacgtgaatctggtggaaattacaatgcaagaaatggtatctatattgggcgttttcaattaacaaatacttatttaaacggaaattatagcaaagcaaatcaagaaaaaacagccttacgatatgttaagggacgttatggttcatggtcggcggctaaaagattttggcaggctcacaactggtattaataaataaaaggaaagtggaaaaattgaaatttcaaaaattagtaactagtgtattattagtagctagtaccactggtgtattaatgactgcacctaaacgggttcaagctgtagctgataccaatactactgagagtggaaaacccgtcgcaaatattgttaataagcctaacctaacaaaacaaggttatgtgttaactattcaagccccatcagggaagatttatgtagggcaaaagaattacaagaaacaattaactactactaagccaatatctaacgcaaaatcagttagttggaagaaaattaaaaacgttagatttagaattgaaaaagttgcttatgcgacaaaggttataaaatttggtggagcaccacagtatctgcttgtctctaaagataaaaaatatagttgctggacaacgcgttattctattaaatactatttttggaatactaaaaagatgcaacaagtaattaagccattgtctaaattgacaactagaaactcttcaagcctaaagaagattcggaataagcaagattttaatcaagctgtattagctgctaaaagattacctgctaatcaaagaaaagttgtcttagaatctttgaatcaagtgaaaaaagttggcaatattgataaggctgaagataatattttgttgttcagcttttagtgatatttctagcacagatttaaaattaatataaaactgaagttagaagaatttatttaatgttgagggggaagaaattgtgagaagtatatctaaaggcattgtatctttgatagcagctacaatgttattagcagcaggggaagggatagttcctaatactgttaatgcttctatgctagattcggctaaaagtagccagaatagtcaagaaagtagtagatacacttggcagagtgttaagctaacagatggaactgaaatgcaaattcttccagataattcttcaaaattagctggaaagattaaatataacggtcaaatatattcatatcgcattgtttcaaataatggtgtatatactatttatttgaataatgaggaagtatattcagttgatataaataatagccagttacctacgacaagtgtaggtggttttgatccatttattaattttacgtacgcaaatggtaaggtagcatttaaacatgcaggtagaaagtattattatttgacgacagagaaatatagtgcagatacggtaagaagactgaaaggaactactaaggatattattattggtttgcttggatttgttcctgtagttggcccctatgtttctgccggcggttttgcctatactgtttataatgatatttttggaaagaatcctaaaaataaatggtatacgataaaagaatattgcactagagggtatgaatattatgcttggaagacctatacttatactgactctcatagaaaacatctacaatctgttaaatgggagtataaaaaagtattatgagaggaattttaactagtagagttgctagaggcatattagcgtttatatttatattttttacgggttggtctgctgcaagattaatagtacagatagaacgttctgaatcgatatatgactaccttattttgggaggatttagtctagttttaggtattttggaactctatagattaataaatagtaagtaacctgaaaattttagaaaattgaacgttaacgtgaatatcaatataacacgcttagcttaaatagtcttattagtttttataattcagtaagataatcggcaaattggtaatatttagttgtagtcgcttcaaaggataaaaagtattcaacttggattactcaagctttcttgcaatactactacctaaacagcaagtctatgcaaggtgtgattaagccactcaagcgaattgctaatagattaaataccagtctgaagaaggcaaacaacaaacgtgactttaacgctgcaatgaaagctgctaagaagttacgtggcagtcaaagagattttgttttacgttcattgaatcaacttaagaaggatggctccatgaatgtagaaggaaagaacttgttattgtttggcttataaaattaagatattaagtagtaaagctcagcagaattgcttgagctttatttttttgtgaacggcagtcgacaaacagtataatgaacttatatcaaaagcactgaagttatttagaaaagaagatggaaaatggctaaaaaagttacgccacgcttggtattagcgattttgtcggcagggatgctctcatttttaggaatattggatgaaacggccacgacagttacttttccaacgttaattaaagaattttcgattactactgatcaagttcaatgggtaaacacactagtcttattggtaattgcgaccattgtgccaattagctcacagattagattaagaatttcgactaagaaaatttttattctaggagttcttttgtttactttggggctaatcatcgatattttatcaccgcgctttgatttattgttattaggacgggcaatgcaaggagtcggcacggggattggcttaccgttaatgtacaatattatcttggctgaagtacctaaagaaaaactaggctttatgatgggaatcggcactatgattactgcctgtgtcgttgccttagggccagtttttggcggaatgattaccgatgcacttaattggcgctggatcttcattatttcgctatttttaatgaaaaacgcccggaaattccccgtattttaatgcggggatggatagggccaagctgacctaatggtcagctttttttattaaaaaatgaagacatatgttcgactttcctgtaaaatataaatatctaatctacagaaggaggtgaaacacatgaagagaatgagcagtttagcctaccattttggcttgaaagtacgcttttatcctagttctaaacaaaagaaaatcatcaagctaaattatgatgctcagcgttttgtctacaactcttatgtaggacgtaatcggaacaattatcgggctaagggctacttagctgttagacaatatcaagtaatgccttttgccttttctgttcttaataattatgagactaagctagcagaagaagtagtcgccaataatgagttattggctaagccaaagaacattcgcgatgcctatagctttttacgcgttaaagaaattgacagtctcgctattgccaatgcgattcaaaactatcagaaagcttggaacaactatcgcaagcttggtcatggaattccgacttttcacaaaaaacgtagtgattggtcatatcagaccaactgtcagtatcctaaacagacagaagcctttcttgataacgggacagctagatttattgatgctaagcacgttaaattgcctaagctaggcgttgtccgcattgccagctttagaaaattgattaaagagcgtttgcttaatcatatcccaactagaattggcacagtcacgattaaaaagaccgctgacgaccagttttacttatcaatgcaactaggcagcgatattgcctttgttaaggaattgcctaagacgcagagtcaaattggcatcgacctcaatcttgataatttcttaacagcatctaacggagcaatggtggctaatccacgattttatcgcaaaaccaaaaagaagcttgcccatgcccaacgtgtcttgtctcgcaggcagcgcagagctaagaaagagggacgcaatttgcgcttagccaagaattatcaaaaacagcgtctagcagtcgctaaactgcacgataagattcgcagacagcgaaatgacttcttgcaagtactctcaactgcactaatcaaaaaccacgatttagtagttgccgaggaattaagaagcaagaacctgttaaagaatcatgccttgtctcaagctatttctgatgttggctggcgcagttttctgaacatgctggcatataaggcagacctatatggcaaagagttcaaaacaattgatcctaagtacaccacccaaagatgccatcaatgtggcagtattatgggacaaaacggttataagaaattaacgcttaaggatcgagaatggacttgtccaatctgtcaaacgcatcatatccgtgattggaatgcggcagtaaacatcttagaaaaaggcttaggcaactggcagaattctaaaataaaaaaagcagcctaagctaggctgcagtccgctcgcaactcgcggactcaaaaggctttggtaattagacgacctctatcggcaatagtcaaaagattattgttggtaagtcaagtccgtatctaagcaagttggtgttctggttagcgcaagctaacgagccagccaccaagccccagaatttattctggggtagttgacttatcttgagtctatttacgggaagctattcaattcggcagattaatccgcttgaaaaagtgaagttcaagtatgtgcaatggctatctttggctattgggctggtctgtttaatgctgggctttacacggattgctaaacattcatttttctcaattcaagttttgggcttcttaattctaggaattattagtttattaatttggctaaaaatatcttggtctgataaggcggctttgattagtccgaaactgtttaaaaatttacgctttagtatgcagctaatagcttattgttttgccaaaattgcaacgctagctttgggcttcatctttccaatctatgttcaggctgtcaatcatggttctgtttcattagcaggctgggttactttccctggtgcggtaattaacgcgctaatggcggctgtagcgggaaagctgtttgataaaaagggtgcgcggctgccgattattatggggataatcgctagtttgattttgatgaatgttttagccccattaagcaacctggcaattgtcttgttatacgttctttattatggcggatacgggatgtgctttggcagtttgatgaccagcggtttgatcactttaggcaaagaaaatcatgcacaaggtaatgcgatttttaatactttgcagcaattttcaggtgctttaggaacagctttagctgagaccttgattgcgctagcgcagaataaatatctgactaatggcacagcagtcggttctaagtggacatttatggtattactgattttgataattattaatttgctcttggctcttgcctttgtgccgaagaagaaatgaagggaagttcagcgaaagctggacttttttaatttaaaaatatactaactctaaatacgcaatatttgcttaatatattaaacaaaattataattattttgattaatataaattacataggagcaaaacatgaatccagatttacttgcggcacttattcttgaaggtcagaataatattaaaaatattgctattattcctcgtgattatcattttgaaaatagtttaaattatgtgttagtaggtttgcggcgggctggcaaatcaacgctattatttaaaagggcgcaggatttagtgaataaacaaaatgtggattggtcacaaattgtttacttaaattttgaagatgaacgattagatggttttcagttggctgattgtaataatatcttaattgcagccaatcaattaacaactaagaagcattattttttatttgatgaaattcaaaatattgctggctgggaaaaatttgctcgtcgtttagcagatcaaggtgaaagtgtttatttaaccggtagtaactctaaggtgttgggtcatgatattgttctgcggctgggtggaagatatatgaccaaatatgtggcaccttttagttttacagaatatttaactgctaaaaaaattccacatgataaattatccgtcttggatacagttaataatggccaaattcgtgctgccgcaaatgaatatctatgttatggtgggttgccagaatctattatcttaacagacaagagaaattacttaacaagtatttatcaaaatgtatttttagctgatatcattgtccgcaataagattcgtaatgaaaagacgatttcattattacttagaaaaattgccgatacagtaatgcaccaagtttcagaaactgtcaaatcttttgtgtaaatagttctttctcgtaaattgattttttaattatttatttaatcaaagtaggattctaaggtgtcctgaacctgaccaaagcctttatgaattcgattgaaataacggtcattgtagctcattgcctgaatgccaataaaagcatcaagcgactgttcagttggaaactctgccttaggcttagctttgcgcttgatcacattgttaaatgattcaatcatgttagtcgaataaattgaagctctgatctgcttgggatagttataaaagaccagcagatctggttctatgtctttcaagcttctgataacatggctgtaaaccttgccccatttggtatagaagtcatgcaggacagctgtggcttcttctttgtttgtctgttgatgcacctgtttgaattcgttcatgatcttttcacgatcgtcgacgcgtactttagcgcagatattgcgcatgacatgaaccaaacagcgttgaaaatgagctttaggataagtcctggctaaggctgttttcatgccaacaacaccatcagaaagaaaaagctcaacttgctttaagcctcgggatttcatgttttgaagcatatctgtccagacttcaatgttctcgctaggtgcaatgcagtagtcaatgacctccttgtgcccattaggcttgatgccaatggcaatatagactgcttcacgctcaaacgtttctcggcgcaaaggaaggtatgtcgcatccaaatagacgcagaaaaacttgtcgcttagcttgcgtttgtggtaagcctcaacctttggaatcatctgcttggaaatatttgatacctgagctggactgtaatggctgccatacatcttttcaattagatcggctatttccctggtggtcacgcccttggagtaaagcttgataatcatgctttccaagatatccgagtgctgcttgtagtcaggcagcgtgtgctgatgaaattgaccgttgcgatcccgaggcacttgcacttcaattgggccaaattgcgtatcaactttgcggaaataagcaccatttctagagttgccagtattccagccatttctggcatagggatcatagcccagaaaggcagtcaattcagcttctagcaagttattaacagcctgttgtagttctttgcgcaataaatcatttattttgtctggattgaatagagcttgagcaaaatctttggtaaaatcattcatgaaggagttcttctttctgtatgtgttttttttgttcaaaccaatcatacgagaaaggaactcctttttctaatgtttaaagaaataaatttaaggaatcattcatccttacacaaactattttacagtctcaagtttcatatgcaactttgtataaaaatataaaaaatgtgattagtacggtaagtcgcaattcgattattgattatatcgattacgctaaggatgcatatttgttattttccaccaaaaattattttgctaaatttagtgagcgtgaaagcagcccaaagtattattttacagataatggcattttaaatttgttttatctggataaattgccagcattactagaaaatctagttgcgatcaagttgcataataaatatcaagagaatttattttatttaaaatctcaaaagacagggatagatattgatttttatgtaccagctagtaaaattgcaattcaagttgcatgggaagtaaatgatacgtcaaaagaacgtgaagttgggaacctaattaaattagctgataattttgatgaagttgaaaacttaataatcgttactcatggtgaagaggctgaaattcagcaagaagataagataattcagttaatgccactatataaatttttattaatgagatagtttttcgataactcataaaatggtaatgctcaaaattttttgagcattttttataactataagatctaaagagatataaaaatggacataagatctaaagagatataaaattaaagccaacaactaaaataatgaaaataggtgaacatcaattatgtctgaaataacgaatccatttgaccctaactttggcaaagttcccaaaatatatttggggcgacaaaaaatagtagaagatatagtaagatcacttgaaagtggcaccggaccctatcaaacttcaatgatctatgggatgcgcggggttggtaaaacttcattacttgctgatattacctcaactttagaacaaaaagataactggattgttatttacttagccatgacaaatgatttgcttgccacgctcatccaaagtatttatcaagaagcagcgaatccagtaaaaaaggcgttgaacaaaattgatggtgtaaagttttcggcttttggctttgaattggaagttcatatatcaaatcctcaatctacttatcaagtgttacttgaagaaatgttaaaagttttaaaaaagcatcaccaatctttattgatagcaatagatgaggttaaagaaactcctgagattgttaatttggcgtctatctatcaaattatggtgttaaaaaagtattcaattaatatgatgatgactgggctgcctaagaatgtttctgaactccaaaataatgatgtattaacatttcttttaagaagcggtcgtgtaccattaggaccacttgatcttttcgatattaagtatcggtatcaaaaagcatttgaaagaggtaataaagagattaataatactgccttaatgaaaatgactaagctgactagaggttacgcttatgcatttcaagacttgggatatcatgtttggcaacattctactgatcaggtaacagatgaaagtattgaaaattcgatctcatcgtttaaaaatgatctgtttcgtaatgcttatatcaagattatctctgaattatcgccagtcgatcgaaaatttttattcatcatggctcataatgataaaaatgttgttaatataagtgatattcgcaagcaaatgggaaaaagttctaattatatttcgcaatatcggcagcgattaatggatagtcaggtaatcattgatgcaggatatggcaaagtggcattttctctgccattcatgaaagactttttgttagaagcagaagaattatatgaaattgataattaacgaaaaaagctgctaattaaactcttcgctttcgtccaccaaacgtgtaagcaataagccgaagtgaatgacaagatccaggttaacagcaagattccaaagaaagttaagaatgggtggtaaatggcgtgatattgcatgttaagaccgcgccaaactaattgattccagaagacattggataaatatgcgcgataagcataagtagccaagaaatggaatacttttaaactggtttgcgaattttttctaacttgatgcaggcaaaaagctgaaatcagtgcaattactgctaaacaataaagagtcattgacggcttgtaatatggtgcattattgaagttgattggataaccgaacttgtgcaactcaacattagtccaaatgaagcaagcaataaataatatggtaattacccaccaaaacttagtgaccagctggttgtaataaccacgcaatcgccatgctaagacaccatacacaccatagatgaagaatgaaataaaaatgcggtcgagtaaataccagtcatgttcgtgcatgccatggaagacattgtaatcatagaaccaaagccagacaaaatagagtacgaaagtgattactgcaatccaaatacctcgagttagattgtgtcctacatagcggcttaatccccagaaaagcggcattaaaatgatgaattgcaacatcatcgtgttataccacaagtgcggggcggcgttcccattaatgaattgccagcagaatgaaccaagattgttaaaatggttaacttgttgcagccatggcatccctactaggtagattaacgtccaccaaatagtaggtacaaaaagattagaccaatttgtctgcatatgttttgcataagaaaaactatttttttcattattagtacggattgtggtatacaaaataccaaaaataaaagctggagccgtatatttgactaaattataaaaaacgccaaaaacatcttgtgtgtgaaccggttgttctacgtccatgaccagcgacataattggctgtgagattactgcgctgcaggcgaatacttttaaataatcgccaatatcagctatttgatagcttttaaattgatctgttttcatgaacttgctctcttcttttcctaatattattgtgtcatttttttaaattaggcgaaaggataatcatgttaaaattagtttagctattttggaaatggggtcaaaatgtcagtagaaaagatcacacaaaacgcactaaaagcattgctttatgaagtagttaccaatcctaagccaggtttagtggatccagttgacgtggggtctcatcctgatatgaatgtgtatttgtttattaatagcagtttgagtttagaaaattattttcggcaagcagctaaaattggagcagattttacggggcaggatttgcggcaaatgtttgaacaattgcgtcaagctggcattgaggcagaaaaagcaatgtttaagacaacgcataatataaatacccataaaggcgcgattttttcgttagggttgtttggctgtgcaagtagctattgtgaaaataataatcaaggtgaatttgaagtgatccagcagatgactaagggcttagtaaagcacgatttaggcaagaggaatgagactgctggagaaaaacaatttttgcaatatggtaaaggtggagttagagcagaagcagaagctggttatcctttggtgagggatgtagcactgccatttttagctcaaaccgaaggtgatttgaatgttcgtttactcgatacgttgatgaaaatagttagtgcgattgaagactcgaatttaataaaaagagcgggaaatattgaggttgtttcttgggcacataatcaagcaaaaaaatatttggcattaggtggctacggtactcaagctggtaaacagtttatgttagaactaaatcagatttttaaagagaaaaattatagccttggtggcagtgcagatttattgattattacaatttttatggcgttgcagcgtgggattatttaacgcaaaaattgtctagttaagaactagacagtttttttgctgtgtgtcgggcatggcatttgtttagtctagtgaaagtctagatcacgggtagttgtcgccaagtgtagcgaaccacaagccgttagcggtgacgctatgggtgaaggaagtggctagcgagttttccgagcctacgtacagaaacctggtcaggccaaatggtggatgagactgcagcacaagttaaagtccaaaggacaaccgtaaaaccaagacggtaaaccagggggcagtggaaaattaaagatgaatgtcttaccccgagagatctcgtggacaggtgaaaccgagtaagctttaatatcagcgatcgtaagcctggtcgaaaaaggttaatcgcgagaagtcagctgaggtcgtagtagtgctgaaggttttgtaatgaaactggagcgaagggcctaatgtttgtaagagcatatctcgctataagcaatgttcagacagtccggataagaggatagcctagcacaaagagaacgtaactctttgatggtgaaagcaattgggacaattctgaataaatttacaagtagaaatggagatatcacgagatggaactaattgaacagattttaagtcaaaacaatctcagggaagcaatcaggagagtcaaaatcaataagggagcgcctggtgtagacaggagaacagttgatgagcttgatagctattttaaaaagcatcaagtagaaataaaggacgccatcatgaagatgaagtatcgtccgcaagctgttcgcagagtctacattcctaaagctaatggtaagaaacgtcctttaggaatacccacggttgttgaccgagtaatccagcaggctattgcccaagtattaatgaagatctatgatcctcattttagtgagcatagctatggctttagacctggacgcagtgctcatgacgttattgaacaagtcttggaatatttaaacgaaggctatcaatgggttgttgacctggatattgagaaatactttgacacggtaaatcatgataaattaatttcaataattagagagcaagtaaatgacaaaaccaccctccatttaattcgagcctttcttaaagctggagtaatggaagatggttgggttaagcctaataaactaggtgtaccacaaggcggccctctttcaccaattctatccaatatctatttagataaaatggataaagaattggaacaaagaggcctgcgctttgtccgctatgccgatgactgcaatatctttgtcaaaagcggtaaatcagccaaacgtgtgatgaattcaatttcatcatggctagaaagaaagctattcctaaaggtcaacgcaaccaaaaccaaagttgtacgaccaaccaagagcaactttcttggctttaccttctggaaaagtggcgaatactggcaagcaaagccaggagatgaccgcaaaatcaagctttatgacaagatgagagaacttctctgtcgcagaaaagcagctgctcagcctctatcactagtctttactaagataaatcaagtagttagaggctgggtcaattactttagagttggcgacatgaaatattttctaattaagttcagtcaatggctgcgtcataaagtacgggtggtaatcattaaacaatggaaactaccaaaacgaatatacattaacttaatgcggattaacaaggcactaaagtgcaattttagtgatgaagatattcataaagtagctaatacgcgcttaggttggtataaaagaagtacgggtcatgtcattaactttctgcttagcccaaaagtattgggcataagcaaagcggatcgcccaggcttggtcgatccgctagaatattatttatctcgtaaataatcacaaacgtagcgccggatacggaaccgtacgtccggtgcaatgagaggggcgagttataaaactccctctactctattttagatttaaagagatttaaaatgaaaaatccttttaatccgacttttggagatataccacaaatttttttaaaagataattcggataatgaaactaaaaatgtagattcaattttctatttaggtttagataccgagtattgaaaaagcattaagctattgcagatagcttaatgctttttttactatttgattagatctcttataatccaaatgcaattttgtataataatgcaccacagattccacctgcaattggtgcaaccactggtacccaactgtaatcccagtgggctgaacctttgtgtggcaaaggacataaagcataaacaattcttggacctagatctctagctggattcaaagctggtccagttggcccaccaactgccataactaaagcagtaattaagaaaccaaccccgatgttagcaatgtcttcagattgcttgaagaacatgccacgatataaaccaactgcgatgaaaagcaaaatagcagtgccaaagaattcggtaataaaaccgttgaacttactgttagccgaatcaccagtcgcaaaactggcaaaaacagcatcatcactagtggttctgccaatgtaaggccagtagacggctactaagattagttgtcccacgatggcaccaagcatttgtaccaagatgtaaggcattacttgatcccatgggaagacgcctgaacaagcctgagctaaggtaacagcagggtttaagtggttccctgaaattgaacccaagagcatggctgggagcattactccaaacccaaaaccgaaggcgatcaagagccacccaccattggcttgaccgtcacggctattaccaccggtatcacgtagtacagaattggcaactgatccgttacctaaaacaactaaaataatcgtaccgaaaaattcggcaaaatacttcattaaccaagtatgttccataatagatactttcttctcctttagtagaaaaaataagtgaaaaatagtacaaccaaaaattatactcttaactcgaaaaatagatatagttttttgtaaaaaagcaagaaaatagcattaaaaaacactaacttttaaattaattaaaaagatttactatttggctgcaatcatcacaattttctaattatccagcaactcaataaattagaccgttccaaatatgaacattatttaacaagccctagataatgccaaatctacttttgacaaataaatgcataatcattatattaatttcacaaatttggtatatagctttatatatacttaatatataactttaagcgctttcaaaatattgtggtactatacagttgttcacaattaatatgcataaaaggaaagagagtagcagttaatgagaacaatatatttggtgcgacatgggcaaactttgttcaatgtgcatcataaaatacaaggtacttgtgattctcctctgacggaattagggaaagcgcaggcgacagcggtgcggaagtattttttgcaaaaagaaattagttttgatgccgcattttgctcaaagcaggaaagggcaagcgatactttagaaattataactgataatcaattgtcttatacgcgactgcgtgacctgcatgaaaaatctcatggtgaatatgaaggacaagatgaattcatgttgccatggcgacgtggctttagccgtattaatgccgcaatggagccggatcaacatgttgaagaaagaatggaacgagcgatcactaaaatcattgattcaacccatgccaacgatacaattttgattgttggacatgggacggctttaaggttatttacgcagcgagtaaatccaacttttaaagaatatgataattgcgggatagtaaaaatgtctgctgttgataataacttgaaatatttaagttatgtagcacccgctaaagatgggttttgagactgtaaaatagtttgtgtaaggatgaatgattccttaaatttatttctttaaacattagaaaaaggagttcctttctcgtatgattggtttgaacaaaaaaaacacatacagaaagaagaactccttcatgaatgattttaccaaagattttgctcaagctctattcaatccagacaaaataaatgatttattgcgcaaagaactacaacaggctgttaataacttgctagaagctgaattgactgcctttctgggctatgatccctatgccagaaatggctggaatactggcaactctagaaatggtgcttatttccgcaaagttgatacgcaatttggcccaattgaagtgcaagtgcctcgggatcgcaacggtcaatttcatcagcacacgctgcctgactacaagcagcactcggatatcttggaaagcatgattatcaagctttactccaagggcgtgaccaccagggaaatagccgatctaattgaaaagatgtatggcagccattacagtccagctcaggtatcaaatatttccaagcagatgattccaaaggttgaggcttaccacaaacgcaagctaagcgacaagtttttctgcgtctatttggatgcgacataccttcctttgcgccgagaaacgtttgagcgtgaagcagtctatattgccattggcattaaacctaatggacataaggaagtcattgactactgcattgctcctagtgagaacattgaagtctggacagagatgcttcaaaacatgaagtccagaggcttgaagcaagttgaactctttctttctgatggtgttgttggcatgaaaacagccttggccaggacttatcctaaagctcattttcaacgctgtttggttcatgtcatgcgcaatatctgcgctaaagtacgcgtcgacgatcgtgaaaagatcatgaacgaattcaaacaggtgcatcaacagacaaacaaagaagaagccacagctgtcctgcatgacttctataccaaatggggcaaggtttacagccatgttatcagaagcttgaaagacatagaaccagatctgctggtcttttataactatcccaagcagatcagagcttcaatttattcgactaacatgattgaatcatttaacaatgtgatcaagcgcaaagctaagcctaaggcagagtttccaactgaacagtcgcttgatgcttttattggtattcaggcaatgagctacaatgaccgttatttcaatcgaattcataaaggctttggtcaggttcaggacaccttagaatcctactttgattaaataaataattaaaaaatcaatttacgagaaagaactatttacacaaaagatttgacagtttcgtggttttaaataaagcagctaaaaatgaaatgttagttgtgcgttaacgaaaagagaacaagcatgaatagagataattatattttgtggtttgatcaattgcatcgcgatgatgttgatttagtcggtggtaagtcatcctcattaggtgagttgacttctgaaacgaatgtcccggttccgtatggttttgcgactactgccatagcttatcgccactttatgaattattctgatttaaatcaaaaaattgataaattattggccactttaactgatccagaagattctgagcaattgcatcgaatttgcaccaaaattagaaaattaattatagaagcgccgatgccaaatgatttagccttagaaattagctgtgcttacgatagcttagcccaaaagatgcaccaaaatgagccattcgttgctgtacgttctagtgcaactgccgaagacctgcctgatgctagttttgctggcgaacaagatacttatttaaatattcatggtcgtgagaatgttttgaaaaaggtgcaagaatgttacgcttctcttttcaccgaccgggcaacttattaccgaattaaacaaaactttccacaagaaaaagttgctttatcagctgcgattcaaatgatggccttttctaaagcagctggtgtgatgtttacggtcaatgtagcaactggtgatgacactaaggttatgattgaggcctcttggggactaggcgaatacgtggtgtctggaactgttacacccgataactatgtagttgataaaaatacgatgaagattgtacacaaaatggtgactaaaaagccaattgagttgatcagattgccatcgggaggaacaattgaacaaaaggtagcaccagatcaagtgaataagcctgctttgactgatgcgcaaatcattgaattagctggttatgctaaagaaattgaaaaacattatggctgctacatggatatggagtggtcacttgatcaaaatgataagttgtggttagttcaagcacgcccagaaactgtttggtcacaaaagaaaaagcaggagaaaaccgatgcaccacaagaagcaactacagaacaccgagtattgttaaaaggcttgccagcttcacctggttttgtctcaggcaaggtacatattattgatgatccaaaagatatcaatgaatttaagcagggcgaggttttggtcactctaatgacgtcgcctgattgggtgccagcaatgaaaaaggcggccgcaattattaccaataatggtggaatgacctgtcatgctgcaattgtatcacgtgaaatgcagataccttgtttagttggaacaactagccgtggacaagctgctacgaaaactttgaaaaacggcgagactgtcaccgtcgatgctaaaaatggtgtggtttatgctggagttgttaaagacgcggttaaaaaagtcgatgaaaagccagctgagcctgctgcagttgaatatttcccaccaactgcaaccagagttatgatgaacttaggagatcctgatcttgctgaaaaatatgcatctttgccagctgatgggattggtttaatgcgcgaagaatttttatggacgacttatattcaccagcatcccctttatttgattgaaactggtcatccagagagggtagttaacgagctagctaatggaatcggtaaagtcgcgcgggcaatggcaccacggccagtagttttacgtttttcagactttaagtctggcgaatatcgcaacttaaagggcggcgacaaatatgagccgcatgaaccagcagacctattaggctggcgcggtgcttctagatattatgatccaaaatatattaatgcttttaaattggaacttgaagcggtaaaaaaggtgcgcgatgagttcggattaaagaatttacatgtgatgattccattttgccgaacagtggatgaagcgcgcaaagtgacggaaatcatgcggacacaaggtttagttagaagcgcagacttcaaggtttacatgatggctgaaattccagctaatattattttggcggaccagttcaatcaatttattgatggttattcaattggttcaaatgacctaacgatgcttttactggggtgcgatcggaataatgatgtgattgctgatctttttgatgaaagaaatcttgccgtcaaaagggcgattagacacttgataaaggttgctcatcaagatggtaagacggtttcgatttgtggtcaagcaccatcagaatatccagaatttactgaatttttagtcagaagtggcattgattttgtatcagttaaccctgacatggtgaaggcgactaagctaaatgtagctcattatgagcagaggatcctccttgatcatgcaactggcttaggtaaaaaggatccaaatgaatataattggtaaaatttataatttgatgaaaagtctttgattgcagtattgcagtcaaaggcttttttagagttcaattttgtttttgggcaattttacatttaatttagtaaaagagtaaggttgaactaatgaaatttcgtaagcatctaaggctaatctctcactggcaaaatcagggttatataaaggatcgcctacaataggacttcctaaagaggcaaggtgaacgcgaatctggtgtgtacgaccagtttcaagcgtcaatttgacaatcgcagtattgtcatcatttttttgtaaaacttgataatgagtaactgctcttaatccagtaggatcgattttgcgtttgcgttgatcaagtggatcgtgaccaattggggcattaatcgtacctctttcagctaagtgatcagcattgataactttagctaaataatcgcggtgaaaaattttgctggttaattcacgatttaaaataggtacaactgcaggatttttagcaattaaaagtaaaccaccagttaacatatctaatcgatgaacaatatagggactctgaccaagataagtagtacaatcgttcagagcagtattggtttcatttagattagggtgcgttttttgcccttttttcttattaataattaaaagattatcatcttcatagataacatcgggcatcttaccgcttggtgcataagcctgttgatcactttcaacatgatccaagttaatttcaattttatcaccaggtaaaatgttttgattaaaatagcgatagttgccgttaactaaaatattttgttcaattcgcaaaaaatgacgccacttgcgagggattaaaagttgacgtagtacttcattgacagatgccggagcaagattttctgggtaaaaaagtgtaaaatggaaactcataataatttcttaagtctaatctagttataaacacgtgttttgatagtatggtacaattttcttgtttctaaaaaggagcaatatttaatgaataacgaccaaccaagaagaggtggctttaaagatgcttggcatcgatttgatagtcgcttctttatcggacgctggattattttaatcctgctcacattgatgctcttaacttgtacctattatacaattaaagttaagacatcaaacatagctaatttgaaggcctcgctttcaaccacaactacaatctatgactacaagggcaaaaaagcaggttctttatactcgcaaaagggatcatttgtggaatatgaccagatttcgcctaatattcaaaatgccgtaatttcgactgaagatcggactttttggaagaacccaggttttagtattaaaggcatggtgcgagctgctttaagtttagtgattcatcacggtcaagtaactggtggtggttcgaccttaactcagcagttagccaagaactcgcttttgacccagcagcagactttttcaagaaaattggaagaactcttttttgcaattgaaattaaccatgtttactccaaaaaagatattttaacgatgtacttgaataatgcttactttggtaacggagtttggggcgtgcaagatgcaagtcgtcgctattttggcaaaaacgcaagtgaacttaatccgagtgaagccgcaactttagctggaattttacgaaatcctagtttttataatccggttgatcacatgtcaaatgctttagcaagacgaaatttaatcttaaacttgatggtggataataataagttgacagcggctcaagctaaaatgtatcaaaagcaaggattaactttgcggaatacttttcaaaataaaaacggctatcgctatccttacttctttgatgctgtagttgacgaggcaatctctaaatatggcttaactgaagaacaagtcatgaataaggggcttaaaatttatactactttaaatcaaaattatcagggtaaattgcaggatacttttgagcaaagctggcttttcccacaaaatggtagtgatggaactgaaagccaaggcgctagcgtggcaatggacccaagtactggtgctgttcgggcaatcatcggtggtcgcggtaagcacgtcttccggggttacaatcgtgcaacgcagatgaagcggcagccagggtcatcaatcaagccgttggcagtatatgccccagctttacaaaatggctatcactatgactcgcaactatcgaacaagttgcagaaatttggtaaaaatggctatgaaccgcataatgtggataatggctattctaatacaattccaatgtatgaagctttagaacaaagtaaaaatgtgccagctgtttggctattggataagattggtgtaagtaaaggcgtgcaatctgttgaaaactttggaattaaggtaccaaagagtgaccgtaatttagcgcttgccttaggtggattatcttcaggtgtttcgccaattcagatggcacgtgcatattcagcttttgccaacaagggtaatttgcctaataattctttctttattaccaaaattactgatgcttcgggtaacgttttagccgaaaataataatccaagcagccaccgcgttatttctgaaaatactgctaaagaaatgacgactatgatgctcggcgttttcactaatggtacaggacgctctgctcagccaaatggcttccgtgtagctgggaagactgggtcaactgaagtacctaactcatatggatttggtaccaaggaccagtggatcgtcggttatacgcctgacattgtacttgctacctgggttggttttgaccgcactaacaagcaacactacatgcagggcatttctgaaacaggaattacgcgtttatataaggctgagatggaaggaattttgccgtacaccgcgcaaactgaattcacggagaaggcacctaaccagattgtgaagaataatggttctaatgatgactggactaatggattaggtgaaaaaattcaagatggactcggttctgcaggacagaaaatcaatgaatggtataatagccttaaaggcttatttggccaataaaatttaggaggactagatggttaacatttacgatgctgctaacaagttagcagaagatttgactcaaactgatcaatacaagaagttgcaagaagcaattaaagctgttgaagatgataaggatgcttcagctttattcaaaaagatggatgaattgcaaaataagatcatgcaagcacaacaagctggtcaaccactttcagctgaagatcaacaagcttacaaggacttaaatgatcaagttcaaaagaatgataaaattgtttcacttcttacgaatgaacagggtttgtacgatttgcttggtgaagtacaaaaagcttacactaagccaattaatgatctttatgaagatcttagaaattaatattcgcgatgaaatttattcactttgcggatgcgcacttagatagtccatttcgtgggctatcttttttgccatctgaggaatttaaccatatctatcaggcagctgatcagtcgctaaaaagaattgtcgacctagcattagctgaaaaagttgatttagttttaatagcaggggatacctttgatagcagtcagccgtcaccacgggctcagttgttttttgctgcgcaagtgaagagattaactgatgcacaaattcaggtagtgatgatttttggtaatcatgaccacatgaagcaagaagatctgctagttagtcccagtccttactttaaattgttaggcaatagtgaaacagtagagcaagctacttttactacggatgcgggttttaactatgacgtaatcggcttttcatatctgaataaccatatcactgaggataaaatcccagaatttccagcaaaaggaaaaaattatacttttggtttaatgcatgctcaagagaaatcagctactgctagtcagaatgtgtatgcaccgtttacagttgatgagttgcaaaacttgaattatgactattttgctttgggtcatattcatgcgagaaataatttaagtagtacgccgtggattgtttatccaggtaacattcaaggtcgccacattaatgagatgggagccaagggatgctatctaggtgagattgatggaaatagtggtaagactactattgattttaaagaaacagggccaattttatggcaagggacaaaaattaatcttgaaggagctatcagtaaagctgacttacaagcaaaaattattgccaagcttgaatctggacaaaaaacgtactttagtttgacgattgctggtgctcaatatttgagtgccgaagaacgcgatttagttcaggatcctgatttttggcaaactatttctcaatcgctgccatttgcttctcagttagttgatgtgcgctttgttgtgaatactagtttaaagttaaatgacaatgaccaacaagccttccaagctgccaaagaagagttatttgcaccagctgaattcaagcaaattgttagtgactggcaaaaaaaggatccagaagctgctaaattagcggctgatccagactttattgcggcggttaagaatctaacagaagtaaaactaatgagtaaattgaaaggaattaaggatgagactgaaacaaattaagattattaactttgggcagttctcgaataaaaccttcgatttgcctagtgatcaaattaatgttttctttggtgccaatgaggctggtaaaagtacaacggtagcttttattaaacagatcttatttggctttcatttgagaagtaactcttcaccgttttttgaagattatacgccgctagctcatgttagtccgatgggcggtaatttagtttttactgcagctgatggtgaatacgaacttgagcgactctatgctaaaggcgacaagactaaaaagggaattttaaccgtcaaaaaagatggtcaagttgtacctgagagtgtattttttgatcaaattcaaaatattgatggctctttttacgctgatagttttatttttaaccaagaaatgctgggtcaggttaacagtttaagccaagaggacttgcttgagcgaatttattacttgggggcagcagattctagcaagttactggaaatgcgcgacgattttgccaaagaagcgggcaaactttttaaaaagacaggtaaaaagcccgaagtaaatcgtctgcttaaggaaatgactgatcaacgtgataaattagcgcagactaaaaatgaatttaatgattatgaacagctgcaccaagattttgtacaaaaaagagcggcattaaacagacaaaaacaagatctggctgttttacaaaaacaagaacaagatttgcatgatttgcaaaaagaaatgggcaattatcagacgctgcttgatttgcaaaaacaggtcaaggatgtcgactttaatggtcaaaattatcaaaaagcccaagatattatggctcagggacgtaatttgcaaaagacgattcaatcggtagaagcgcagttgcaggacctgggtgaaaacgatcaatctgattttacgctagagaataagctaatccagcagaagcctcaactcttgcagtggcaagcggaatatcgtaattgtttgcaaaaggctgaccaattgaagcaggagaaagagcaactattagctttgacacctgagttaaaaaatctactcaagttgacaccagagcaaattgaacaaatgcaggcagactatcaagctttgccaggtgctgtcaatgagcctgcttatgtaactactaatgacaagctttggtatgttatcggtgcagtgttagcggcactaggtgtagttcttttggtagcgttgggtacagttggtgtaattgcattaattactggactaattttcctagcagcaggatacttaaaaaatagtaaccaaaataagcaaaatgcggcagtattagaaaagcaaaagctggttgctcaaaaacgccaagctttccaaacaaaatatggattaaatcctgatacgctaaacttaaatagtttactaactaatctgaaccaatatcaaatcaaggagagtgccgcacagactaataataagcaagtaactgtcttgaatcagaatgtggctcaactggcttcaagtgtccaaaatgcattgaagcaaccgattgataatgactttagtcaagttttgaatggtttggacgaacttgagacacgaattagtgaaaaacaagaattgtttcaaagaaaatccagcttaactgcatcactaaagcaggacaagcaagatttgaaagaattgggtctgaaattacaggcactttttgcccaagctaatgtggaaaatatggcaggttacgatcagctttatcaagattcacttaatcaggctaaactgaagacgcagattgcggccttgaaggaatcgttaggcgatgatcttcaacagctgcaaatgcagacaaattcaaccgaattagcagataaattaacggctttgactgaacaaattagtactaagaatgcagaaattaatgaacttcagagtcaagttgctcagttgcaagtgcagttagacaatttagctgattctactgcggtgtttaaggctaagcaggatctggctaatacagaaaccaattttgtccagagcagtaaagaatacttggctaacttgtttgcggcaaggtggatcagtcgctcgcttgacttggcatctaatgaacggttccccaagatgcttaaggcggctcaggaatacttagctttgctaacgggcggcagatatgttgggattaatttagataagaagctaacagtagtcagaagtgatggtaaaaagcgcgaagtaaaatacttgtcacgggggactgctgagcaattatactttgccttgaagttagcttttattgagcagatcaaggatgaaattaatttgccaatcttgattgatgattcgtttgtaaactttgatgatcagcgagtcagctatatcgatcagttattgcaaaagattagcgaaaacaatcaagttttaattttcacagctcaaaagaatttagttgatcagcttgggattgagccattaacttttacgaaaggaacacaggatgcttaagagattgttagattacaacgatggagaagaaatggacattgttgttttgattagaaactcacagttgcgtcataataaaaagaataagttgtttttagcgatgcaattcagtgatggctcaggcgagattcgcggtaattactgggatgctaacaatcaagatgcagcaactttttcaactgggacaatcgttgagttgaatggcaaaagagaagaatatcagggtcgccctcagattaggatctattctctgcgcgtggtcggtccacaagaaggctatgaattagatcaatttattaaatcagcgccggaaccagttaatgagatggaagctgaaattaataaatttgtgatgcagattgataatccgacctggacaaaaattgtgaagtatttacttcaaaaatggcatgatcgtttttatgatcatcctgctggtaaaagcaaccaccatgcggtccgcgaaggtttagcttttcatactttatcgatgcttaaggatgccaaaggtttggctgataattatgagcaagtgaatagatcgctactttatgcgggatgtattttgcatgatatgggaaaagtactggaactttcaggttctgccgcaactcaatacacgactgaaggaaatttggttgggcatctggttttaattgatgaacaaattatgctggccgctcaggatatgaagatgaatctggagtcggaagatttactcttattgcggcatatggtgcttagtcaccatggccgctttgaatatggttcacccaaattgccggcattgctagaagcggaattattgcaccgaattgatgatttagatgctgcaatttatgcagtaacgaatgccctgcagcatacgcctaaaggcgagttcaccgagccactactgagtcaagatggcaagcgatattatcgaccgatgcacgattcagcgctagataacgcaaaacatttagaataagaaataagcatcactgcagttgatttgcagggatgcttattttgttgaaaaattgaactagagttttattataatttcatagtataataaatctaatttataggggagtaaaaaggatggatattgctgaaattactaaaatgattgaggcggttaaacaaataatagaaaagaatgattacattgatttgccgctatttcagaattctagtcaattaaggttaaaaggaaataattataattttatacttgatttgaatagaaaaggacatagacgtcctaaatgtacttttctattaagggaaaagagaaataaggaacagccattagttagagtagatattattggacgtcctcatcaaaatcctgttggagactttaaatggtcaaataaagtcattccttgtcctcatttgcatagagcggattttccaaaatatggtacatatgtagctgtaccacttttggaaaagaatgaaaattttcaattgagtcagaatgatttaaataacttgtgtgaatgcttgaagaagacattaaagtttttgaatgttgataatataaattcatataattttcgagaacaggaaagtttattttaaagaaaggggggagaacagttaaatatgtttgatgtagagaaaatgaagaaaatatattttgactggatagataaaaagattcaatttgtcccttctaaaaatcaggattatatgactatcactacaccttttttagatatgtacaatgattatatagaattagtgattgcacaaggaaatacatcaaaatatataattagtgatgatgggtatactattaatgagttagggttattagatattaatttaaacagaaaatctaaacgtagggactactttcaatcgattttgattaattttggtgtgaaaaatcagaataatgaattagtaattgaatttgatgacttagcccaatttccagatgcacaaaataggttaactcaatgtatgttgcaagcttttgatttattacagacttctaaaaatagtgttattaagtattttaaagaagatgtaacaaattattttattgataataatattccagtaggagaagatttgagtttactaggaaaaagcggacggaattctaagtttgatattgtggttggacgtacaagaaaaaaaccgcaacaagctattaaggtggtgaatacgcctattaattctaatatagctaaccctttatttagaattattgatgtacgagaaagccaacctaaaacagaattttcagttattgcgaacaatattaatagtcctgtttctagtgattttaagtctgcctttaagaactataatattcctgtttattcttggtcagaaagagagcaatggctttccaaatttaaattggcaatgtgatagttgattaaaggtgttgagctgaaattgtaaataatattagttctagcattaggcaatatggaacatttagaataagaaataagcatcactgcggttgatttgcagggatgcttattttgttttggtgaaaaattgtgtcaataattttttgaacaaagttattgacaaattagctgaagaataataacatgtttatacaattgaaaagcagagatgtttttggatagattagagacttgtctcctttctatttttttattgataaaaagttcaagaggtatacattgatttcctcttggacttttttgatgcattgaattgctaaagatgttataaaaattagggtagggaataaaaatgaaagcatcaaaaaaattaattttagtatcggcagctacgataatgttgactgtacctgttttagcaaataatcatttgtctaatccagttgttgccgcaagtcaagataatacacaaactactaaattaacgttctatattaaccacaatgcctatgtttacaatcatcaaggtaagcgtaccaagagcaagattaagaagggaaagttactaaaggtgactatattgaagcctaaggcaattactaacccaaatcaaagcaggtatttcttcaataatgtattagctggcaagtatttttcgttaccgacagtaagcatcaagaagacagactttgttaatattggcaaaaataaatatattaagccaggcaacattggtagaatctcgccaggaaaatatcaatatgcggatctgtcaactaaggaaattaaggtaattaccaaaaagactgctccagtaactaatcaaatagggatgccaattgctgctccaattaagaagggaactaagcttacagttgatcagaactattatcataatgttgacggcgctgatgattatttgagtagtctggaatattatcggattaaaggtactgataagtgggtcaacctacctgctatcaaaaagtcaactcggattatgccaaataattttgcattagctgcatctactgaagataattatgtcattgccggtaactcaacgtatctctataatattgacggtgaaatcgttgataagagttatttattgattccagatgttaatgttggcgttgatcgagctctttatatttggaacaagcaaactaaacaagctgatctatattatcatcttacggctaacaaaaaattggtctgggttccagctcttgatggaacaggcaagactggtactacgattaccagcaacggctcatatgctcaccaaactaaagatacagcaaatacttttgttaaagctagtgatgtgacaagtcaaaatccagttgcattaaaagttgataatacaccgagcgaagcacaagcagatgcaagtcaggccactgctagtgactatggtgagttgcaagccttagttgatcgagcaggtcaaattaaaaaatcgactttatatcgtttgactgaaaaagcacagcaagaaagatatgatttggccgttgataacgcacaaaagttattgactaacaagaatacttctattgcggcagttaagcaggctagttggcaaattaaatacgatcaaagtaaattagacggacaaaaagtttgggttaaaaacatgaataaactaactaaggcagaaaagtcttgggtagtttcattggctaattgtgatatccatggtgatttacaaaaagaatatgctggcttttataaaggtaaaattgcggtagtgacttataataaaaagactttcaagagtgaacttgtacgctacttgaagttgtctgattatgctactgataaataaaattaaagagctcaagaatgctttaatgatgaagcatcttgagccttttgatttgtagtaaaaaaatatccaagaccgaaatcttggatactcattggagctggaactgtgcttgatgaggcaactgctagaatggcgattgtttcaggagctagattcgttgttagcccatcttttaacgaaaatactgctaaggaatgcaatctgtatgcggttccttacatgcccggttgctttagtccaacggaaattcaatctgctttaacttatggtgctgacgtagtcaaaatcttcccaggttcaattgctggtaaaggcattatttctgaaattcatggacctttcccatatgttaatgtaatgccaagtggtggtgtatcattaggaaatatgcatgaatggtttgctagtggtgcctatgttgttggtgtaggtggcggattagttggacctgctaaaaatgatgattataaagctgtattgcataatgctcaagcttttcataatgaatttcaaagtattatttatgccaactcagctgctactaggaaggtgccagtgagggcatagtttttttactgggggggaatatgatgcccctattaaaaaaataaattaatgaaataaaaaaacgtcgaatccattcagattcggcgtttttgattaactaaatatatttgttacttagtagttgaaacgtatgatgataatacatccttcaagtcgctatccttgattgaaacgtcagccttcttcaaaacagtagcaataacgtctttcatagtagcttggtcttgagccattgatgcgtaaatttggtcatcgatagccttcttgtggtcagcaaacttacccttagctgggtggctgatcatcttgattacgtggtaaccagattgtgacttaactggagttgaagtaacttcaccagtcttaagcttgaatgctgcagtcttgaatgagctgtctaaagtagtgtcagttgagtcgaatgatggcaacttaccagccttgttcttagtagcagtatcaagtgagtacttcttagctaaaaccttgaagctcttgccatctttcaattgcttgatgatgctttgagcagttgacttcttagcaaccaagatgtgttgaacagttaccttaggttgatagctcttccaagcttgttgttcttgcttcttagtaactttcttaatgtgcttcaatgcttgttcagaaagaaggttagtcttaatgttttgcttgaagcttgaagcagtcataccattttgttgtaaaacagcactaaattgtgagccgtattgcttcttgtagttgttgtattgcttgtcgactttcttttgagatacgtacttgccgtattgttgttccaaagcgcgattgatgatcatgttagccaaagttgacttaccggcttgtgacttcttcatttcatcatagtattgttcttgagtaatcttgccacccttgtatgaagcaacagtagctttagtgccgctattagaacaagcagcagttgataatgcaacgccagctacagctacgactgcagcaatttttttcatataactcttcataaaaataatatctccacatccttaaataagtaactgttcattaatataccataaaaaagggcgtttcgttttcaaattacgaattttcacagaaaaatcaaattttctttattttttcttagttctttgtgtcttgtgagttagtatctggcacgatgttttccaaatcttggttcaatttatcgctctttttttctatgcggttaacgataggttgaatatggtcggaataatgttcaacactatcattaatatcactaattgtacgttcagctgttggcatttgttcatttaattcttgactagcctttttagctttttgcaaggcagaattaaagcgttggctttcatgtttaattgcttcgaactcatcttttaatggcttgcctgggcgattaccattgctatctttcatacaggaaaaaactagcccagctgttgcaccaaaaactgtgcctaataagaaatgtttcatttttaacctctaaaattgtgccttaattttgttagcaacttcgttgtatttagcttcatcgtatttgtcagcgttgttgcgggtcatcagcttcaagccatcgccttcaaaacgaggaatgaagtgaatgtgtgagtgcataactacttgatttgcggccttaccattattagtagtaatgttcattgcagtaacattagggaaggctgccttaattgcattagcaatttcaggaatatattgtaaatagcgttgtgcgtcttccttggtgtagtcaaacaagttaacgatgtgcttttttggcaccattaaggtgtggcctgggttaacttgagaaatatctaagaaggccttaacatcgtcattttcaaaaacggtatagctaggaatttcaccgcggataattttgcagaataaacaatctttgtctaaattttccataataaaacctcatatccttgtactttagtttactattaaatccatgctatcataataaaggtataaattcagtaaagaaagataggaaaaatgacattaaaaattgaacatttaacgggaggctacacgggtgtcccggttattaaagatattaatttggaaattaagccgggtgaggcactaggcttgattgggctaaacggcgcggggaagtcaactacgattaaacatattttgggtttacttcgcccgcaaaagggtaagatcagcttgaacgatgttgtattgacgcagcaaccaactaagtttaagcgtgaagtagcttatattccagaaacaccgattttgtatccggaattgactttaaaggaacatttggagctaaccatgttgagttaccacttggatgaaaataaagcatggaaacgcgcacatgagctgcttaagatgttcagacttgatgacaagctagaatggctgccgattcacttctctaaggggatgcggcaaaaagtaatgattgtctctgcctttttagcagatactagtttgcttgtaattgatgaaccatttactggccttgatcctttggcagttgctaacttaatcgatttaataaaaaaagcaattgctgacaaaaagatggtcttaatgactactcacgttttagctgatgcacagcaagcgatttcgaattatgctgtgttaaaccgcggcacgatcgaagttgtggggagtttgcaagaaattcgtcagcactatggccttaagccagatgatccttttgacaagttataccttgctttgaatagagaggataatggcaatgcgtgagttagcgaatagaaggttgagcgagaatcttaaacaatcagtaaaatatttgacgctggtgtttaatgacttctttattttagcgttgatctttttgtttggggcgctgatgttctggtatgcgcaagctatgcgcgtaattcccaataatctgtggttctataagccacttgtcggctttatcatgtggttgccattattagctggtcgattagttaccttattaaaagaggccgacatgcaatttctgtttacgcaagatgaacaaatgggtgaatatctgaagccgatgattcgttacagtatggtgctgccaacaattctgattgttttgcttggcggaattctgtttccgtttgcgacggtaaaagctggaatcccagtttggtcatatgtaatcctgattatcagcactgttttattaaaattgtgtatgttgctgattgaaaaagagagtttgtacttctactacaattatccgcaatggatattattagtggtaactctggcagctttgttgattggctcactaggatcatttatttatccaattgaagttgtagtattaatggtaattacacattttggtactaaaaaagaaaagggcgtctttaactggcgctatgcgattaaaactgaacaagctagaaaagatcgcgtttattcaatcttcagtatgtttaccgatgtggcagaaaagcaagttacaatcaaacgcagaagatacctcgactttcttttaccaaaatcattggctaaggaaaatcctaatttgttcttgtatcggagatcacttttgcgtaatccagaatacttgaatttattagtcagaatgactgtgtttgcaatcttggtatcgtggttagtgcaagattggcgttgggcactaggcctttcatgcttggtaatctttttaacggtctatcaattattgccaatggcaacagagtttgaccgcaacttcatgtaccgcgtttacccaattgaacggcaaaatcgtggcagggacttggtaaaggtgttgacaatgggcttgtttattcaatggctcttgattagtgtctgctggttaattgtgctaccaattaatgttaacttgtttgaagcgatggcaattttacttggtttcactatgattgtaactgccacttacttgccaggcagagttaaaaaaatgaatcaaaaaaattttggaattagataggaatagagaatgagattaagaaataaaccttgggctgttaagcttgtaaacgaccatccagaaagtgttttgcaaaatcctgatcctgaaaaaaggatcgactggactgaacgatttggtaatgatcatcccatcgaaattgaagtaggttctggtaaggggcatttcattactacgttagctgaacaaaatcctgataaaaattatgttgcattagaattgcaaactacggctgcggggattatcttgcgaacaaagttggaaaagggcttggataatttacaaatcttacgcggggatgcggctgacatcaactgcttctttccagcaaatagcaccaatgttatctacttgaattttagcgatccatggccaaagactcgtcatgaaaagcgtcgtttgacttacaagagttttttgagcaagtatgaacaagttctgaagccagaaggacatattgaatttaaaaccgacaatgcgggcttgtatgcttactctgttcagagcttgaataattatggaatgaagtttgattttgtttcagttgatcttcatcatgaaaagccagagattgtggaaaagaatattgaaacagaatacgagcataaatttgcagctaagggtaatccaatttatgctttgcacgctcattttgaggatgaatagtttgaagcgtctagagttacagcagatgaactctaggccttttttaatgctttattggataaaatcttgctactagctcatcgctttagttattttgttttagaatagaactgtaagatttcagattattggagggaaaattatggaagataaaccttattatgaataagaatatcacgaacctgaaactgatattcctagaccaacttttggacaagcattcaaacttttgtttactgcaccatttaagtggaatgcacgtagtactcgtcgtggattttggtatgcctatgtttgggcaattattttgctagtcattttagcagcatgttcagctacggcatattcaattgatggcattgcttattcaagtaatgaattcttcttattaacgcacgtttcaactggtacacttattattcaaataattatctatctactgattatttggatcttattaggcttacttggctttaccataagaagattgcatgatactgaccacaccggttggtggtactggatctcggttattccatttgggtatttgtttttactttacttcatggttttgccaactgttgaaaaaccagttcgttggggcagttatctatttaaagaaaagaaataattgtaagactcaatttctagctttttagttaaagaatggttataataatatcaacttataaaaagtaagaaatacatgaggtatgaaaaatggaaaagattaaagaattaactgaagatcaattaaaggaaattactaaagaaggacgtactgtgcttgaattctcagctgattggtgcccagactgcaagtttcttgctccatttatgcctgaaattgaaaaagatttttctgatgcaaaattctacgaaattgaccgcgacggttcaattgacatagcaaaaaaattaatgattatgggaattccttcatttgttgtctaccaagatggcaaagaaattggtagactagtaaataaggaccgtaaaactaaagatgaagtggaaaactttttacgatcacttgactaatagaggagaataaaaaagcatgattactagtactaataaagaagcttatcctaacactttgatcgttatcttaggtcacgatgaaggccgtagctcatttgaggaaaaagaagacgttactcgcgtaactaacgatgaaggcaagaccattggttacaacttcttcaacgttgataagttagttgactttgataagttaccaaatggtccagttaagttgtcagacgatgagcttgttgcactgaacaagaagcttgatgaagttggttttactgacaagttagcatatggcaagccaactttagtttatggctacgttaagacttgtgaaccacaccctgattcagatcacttgcacgtaactactgttgaggttgctgatggtgaagaacaccaaatcgtttgtggtgcaccaaatatcgctcaaggtcaaaaagtagttgttgcacttccaggtactttaatgccaaatggtgcacaaatttggccaggtgaattgcgcggtgttgattcatacggcatgatttgttcagctcgtgaattaggtttgccacacgcaccacaaaagcgcgggatcatggttgttcctgatagcttcgaagttggtgcagaatttgaaccaactaagtgtgatgaactgatcgctagtggtgaaattactttatagttttaaataaattagaaaaattccttagttacgaaaactaaggagtttttttgttagctcagccaccacttaccatttggagcaagggtatataagccaagttctttcgatattaatcggttgtctagatctttactacaagtatagtaaacgtatttaatgaaatcaccattgccattatagcgttcttcataatcactcaaatatagctgatgatttttcatgaacagtggaatctgatcttcagtataggtgattgcaaatttgtctggaaaataccctttaactgtgcagcctttggtatctgtcccttgatcattatcactgactaattgcacactgtcgtcgctggaaattaaacgtaaattatgcaaattaacagcatttaacgaacaagtgaaaataatttttgcttctttttctggttgatatttaaaaatatgcaattcatttgatttagtatttacttgagtaaaatagaaaaagccatcattgaaaattggttcgccgtagcacacgttaggttggactgaaaatggtgaaaaagccttaccgatcttttgatcaaagaagattaagcgattaccaggataaatgcgagtttgccaataatcgtcacgcagatcttcaaattgtacataatcagaaatcgttacccaatattgatcttgaccggctaatggtctttgatcacaccaataaggcaagatgaaactatcattagatagcaaaatgatatttccttgcatgtcgcttagaatattatcatcgaagtccttgatgataattcgatcagggacatgttcatagtcattatctgaataaaaatcgctatcttgttcaaaatagagtttagtgtcattaatgaagagcaaagtttgatctggttcgttaactactgaagatttttgtgggtaataaaagtcgatgttatcatcaaaagaagcaatccagacatgtgccttatcgtaaaccaatgataaattataagtgtgtaaaccagtaagtggcatttgatggatgatttcaggttcttgtccaggtaaatacttaaataaggttagttgatcttgtttaagtaatgcatgtagaaaatagaaataaccatattgatagatcacgctaaagaaaaattgattttctttacttgaaattggttcaaatttttgtccagtttgaaagtcaaagaagactaactgattgcctggaaagggatgcttttgccagtatttttcagtagttaaatcgtaaatatcgattgcactatcctgacaatcgacaccgtagcgtgattgtccttgaatgattgttaaatcattgccggttacaggagaaaatttatcgaatttcattgatgcgtacctttctgtaatttttcaaaattatatcacagaaacaatggtaaaatagttaacgaataaaaacgttgaaatttcgagggacaaataatgttagataaaaataaacaaatttggttcattggtatcaaaggtacagggatggcatcccttgccttgcttttacatgacttaggctatgatgtagcaggtagtgacattgaaaaatatacctttacgcaagtgccacttgaaaatgtgggcattgatgttaaaaactttaacccggataacatcaagagtaatgatgaacaagtaattgttaaagggaatgcttttaaagaagataacccagaagttaaagcttgtttggacaaagatgtcaaatggcaatcttacccagatactgttgaagaaattgtccaaatgcatacttcaattggtatttcaggtactcatggcaagacttcaactactagtctcttatcacatgtattaggtgaagttgccccaacttcttacttaatcggcgatggtcgcggcaaaggtgtggcagattcgcgtttctttgtttatgaagctgatgaatatcgtcgtcactttttggcatatcatccagattaccaaatcatgactaatattgactttgatcatccagattactttaaagaccaagctgattacaccagtgcttttcaatcagcagctgatcaaactaagaaggcgctctttgtttggggcgatgacaagcgtcttcagagtcttaagaccgatattcccaaatacacttatggctttaacgatactgatgacttccaggctactcaaattcagaagtccactactggttctaagttccatgttttagcacatggtaaagatttaggtgaatttgaaattcacttatttggtgatcacagcatcttgaactcaactgctgttattgcggttgcttacactgaaaaagtgccgatggatgacattcgtgaagggatgttgacctttaagggtgctaagcggagatttagtgaaaaagactttggcgatattgcagtaatcgatgattatgctcaccacccaaccgaaatgcgtgcaactattcaagctgctcgtcaaaagttcccagataaaaagttggttgttgttttccaaccacatactttctcaagaactaagaagtatcaaaaagacttcgaagaaatcttgcgtgacgttgataaagcttacgtaactccaatctatgcttcagctcgtgaagctaacggtgatatttcaagtgaagacttggttaagaatattcctggctcagaagtaattgacttagacaatattgctgacttgactaagaataagaattcagtcattgtctttatgggtgcaggtgatattcctaaatatgaagatgcttttgaaaagttgctttaattgaaagataagcatgaaaaaaactgttctcaataagagagcagtttttattttggctaatctttgattttatctttaagatccatactcttttcgtaaatgaagtaaccaatgatacaagtgattacatcactgactgcttgagcccaaacaataccatgataaccaaatacatctttcatgatttctagtgcgatgaaatagacaacgccttggcgaacgatggccatgataaacgctgcccatgcattaccaactgattggaagacggtagtgtaaactaaaatgataccaacgattggtgtggtaataatagtggcaattaacatataactaccagcgttgatgatatctggttgattcataaatagagcggtgactggacgagcaaataaaattaataatccgcctgaaattacagcataaacaatttgcacaagaatatcgaagtttagaattttctttaatcgtttccagtttttagcaccatagttgtaaccaattaaaggttgtgaaccaaaggcaaaaccaacgattaccaagataacgatactgtaaatcttttgggtgattcccattgcggcaactttgtttgcaccgtatagggctaaagatgagttaagaagtgccataccaaagctttgagcgaagttggtgattgaaccggggatgccgattgctacgatatctttgattgttttgccgctaattttgctatattttagctttaatttgatgtagtcagttttgtataaaacgtagtaaatgagaatagcatcagtgactagataacctgtaacgttggcaatcccaacaccgattgcacccattttgaaaacaaacaagaaaataggatcaaggatgatagctaaaatggttcccgtcattgtagcaaccattgcttgggtagctaaaccttctgttctgattaagttctgcggaatgattgagaagataattggcgcagcaccaattgatattacacgataaaaatcggcagcatcttgataggtggcagcttttgctcctaaaagatgaaggatcggattttccaaaattagtaaaatggctgttagtattaaaccagtaacaaatccaccgatcatacaaaaactgcttacacgtttacttaattgataatttctttcaccgaatagccgtgaaattagtgaagatccaccgagcccaaaaatgtcagaaacagcgattaaaaaagtaaaaagtggagcaccaatcgtaattcctgctactagatttgtatcacccgttttggcaacaaacatcgtgtctgccaagttgtagatcatggtagtgatcatccctaagacgaccggtaatgctagcttaaagtagacctttttaatcggcgctttagcaaataattcatccataaattttcccccacattgaaaaaagcgacctagaaagatactttgaggtaaacctcactattctaggtcgctacgttatatcatttatttaattttagcatattgtgttaatttgtgaggtgattatctaaattaaagttaccttgaaattcatcagtagtgctttcttgatccataccatattcagcatcgtcgccccagtaaatgtattgtgcatttttgcccttggtaccggcaattctgaagtaaagtgcagcgctgtcgcctttaccagtggtcttggtggcatctaccttaactttttgaccaatcttgagcaacttgctagttgacttgagcttattatttaaaacgtggatcttgtttaaaatagtggctgtagtggtgctagaagcttggtaaagagtgttgccgttaacaaaaccaacatttgaagcataaatataagcaccgttgcctaaagcataaaatggcttgcccttgatagtggttgtattcaaacttctcttcttagatccgctaagatttgcaaagtagaaaaatacgtcattcttagttgtggcgtggattttagctggcgttttaactagcatatatttaggaataagcgacataccgttgaaagtagtgcggtgaccgtttttatcataaatgcgagagttggaactcaagattaaaacattttgcccatccattgagctaacattcaaagatttgatgtagcgttttttaccgatgttaacgtaagaagcggtagtgtagtggtagttcttagaagtttttgcatctacttttttaccttggatcaggataggtttgccataatatttaaaacttgagcctgatttaaccgttgaagcaacagtcatcttcttgccattgactttttgggtagtggtagtggcattgcctttgctgttgaagacttgaactgtgccgttaaaggatttcttgagagtaactttacctttttgtgattgcgtagctgcttgaactgtgtgaacaggttgattgataatggcagctgctggtgcaacactgattaataaagctgctgcgatagttgctaattttttagtagtcatattttgtctgctatataaaacatggaaatatgtagaagaatacgaatttcctacatatcagaaagatatatttttcctttctttgtttcatttactgtcgtcttcactagtattctgatattccaaataggagtaatcacattgactagctcttacagcttaaggacctagcaagccctgtttattttctttattttgccaaagctaaaagatttaaaaccgcattttcatctcgatcattcttgtagccacactcataacagacatactcattatgtttggtaccatgctttttattgccctgcaaagtgatcttttcctcgccttttttgacataaccgcacgcagcacatctttgagttgatgggtatgttttatcagccgagattaattatttgccataccaatcacacttataagttagtattcgtctaaacttgctaaaaagtgatctctacattccttttgaagctacatgcgtcatcatcatttctttgactgccaaatcttcaattacaatttgatcgtaattattaacaagcttagtagtaaatttttgtaatagatcgttttgaatattagctgctttgcgataatctctttgcagtttggttctcactgcaaagtaattatttgattttgtagctaacttaccgttaacttctcttttacgtgccagcattctttgataatgcttaatacgcttataaagcttttgcaatttagcaggcaaaatattgatttgcccctcggtatagttaaagtggccaacattgacatcaactgctgtcttttgctgggttttagcttttagttcaatttcttcttcataaggaagagccgcataataattatctttttctttgaagacacttactactttgacttcatccatctttagagcttcatagcttcatagcttcatagctttttaaatcaaaccaaggctcttttgaaatgcttcttgggcgatcaaggcgaagcttaccattaacgatcttagctctatcagttttaaagccttgtctgggagctttcttagatttaaaactaggtattccccaatcaggttgtgacttatcaaagaagttcttccaagcattagctaagtctttaatcgctaattgtaaacatctggcagacaaatcatattgccagtcggctttatttgcgactagttcatcacggactctgcgttcgttaggactgggattatctttttggtttaatgtatgagcttcatacattaattgccaagtttctaagcctttattccagcagtatcgacgatagtcgcatagagcatcaagatgcttttgcatggtcttattaacttttagcttaactacttgtgtcttgatcgtcatttaagtactcgcctctaatctttttcttgtactttcttaagccatatagtctgcatgaaaacacatgaattatacttatcagatcatcaaccagttctttatcaggactagtgtcaatattattcaaaacaattatttcagtcccatgctttttacataggttttcaaaccaatcatagccaaaacggataaatctatctttataagtaatataaattttatctattttgttgttcattacttcgtctagaagattattccatttttgccgtttatagtttaagccgctgccaatatcgcttatttcttcgtctaatacgataccttgtgcgttagcgtattgtcgaatatggcttaattgatcttttaagtcatctttttgaccataagttgatactctggcataagcaacttgttttttatttgagcttagattatttttgctcaaatattgatatatttgatcttctgtatagaatctgcgattagtaggagagcgcttagctttaagaataccctttcgatcccatgtttggagggttctagtggttattcctaaacgatcagcgacatctttaggttttaaaattgtataatattcacttccatgtttaaatttctaatgaatattatggcaaatatttctattatattctataaatttccatattttgttaacagttaatcagctcctttgtaataatcccttaagttgattttagcacttatgagactataaaaataacctcgaaactcaaacgttttcggggttatttgattttattcacttaagtacttaggatcaataaatttattgatcacgttgttaaccttctttgaattatcgtacttgcggataatgttcaagaagtcttgtgcagttgcttgcttcaagtagtaagtttgatagtaatcgtgtaaagcatcgaagaacttggtttcgcccatggcaacctttaaaacagcagggaagtccatcccaagttcgtaagccatgtcttcagtgtcaacgccctttggtggattattaacagggtagttgatgtagttggccttttgattcttattaatgaattggttagcattttcttttaagatcttgttagcacgcttgacgttcttacgagtatagaacttgctgtgcatcagtttagcacagtaggccttattcttagtgtaggtcaaatcgtaaacgccattttcaaggaggttggtaagaccttcgtcaagccaaggttccatgtattcgtcgctgccgacagtgccgtagaaccattggtgaccaacttcgtgagaaacatcttcagttaattcattatatctatcaagtgggtgcttcttttgtaaaaagccgctggcatcgatcatgatcaagccaggatattccatcccacaggtatctttgccaagcaagcctttagtaatatcgatttctttgtaaggatatttgccgatctttttggtaaaaatgtgaaaactgtcttgggcagtcatcaaagcaagcttgttgtattgcttgctgtttttgcttgcaaggtagtagtcgttgattcttacgccgtttgcataagcgtggtcaaccttgaacttgttggaagcagcgattgcgaactcacgcatgttgttggcggtaattgtagttttgccatttttggttgtgctttgaccagaagcggcaactttgtagctctttggtgcgaagaagctaacgtggaaattgcttacagcactgttgcggttttcaccagcatcgtagtatgggtgataattccacttaccgtttcacggtcatgttgtaatttgttgccttgatcgtaagatcagccgcagcttgaacttttgagttgaagttaaataatgccgtaatggttactgcactcgacaataaaagtgttgttcttcttttcataattttccatccaagaaaaatttactctaaattacttaaacttcccacatcaaataagctggcaattctttgatattgcttagctttgggcttctatactatttttgctagttttctttaacaatttttgcatgtatttgggtaaacgattgataaagtcagccgtgaattctgctatttgtgcttcactggcatgaaagactttttcaacgctagccaccattgcttttgtgattagctgaagtgaatgactgaatgtaatatccgccagctcatcaatcatgcaatagaaaagctcacctaaggttcgctcatcttcgtcgtcccgcttggctactgacatgagcatatagcgggtaaagactatagccacatgagcagtcaaggcatcgtaggacagaccatgatattccgtgcttagttttaggtagcttttgcaggttttgaaaaaaacttcaatatcccagcgtttgccataattgcgaatgacttcatcttcgctaagcgacatgtcggtacaaataatagccagccactctttacgattggcacggtttctaacgcaaattatccgagcgtcaattttagcaccgtctttgtcttggcggccaaccttgactggaattgacaacagatagcgcgaacgcccgcgtcgctttttacagctacgataaatctgtttgatgtttttgcgttctccttcaaattcatatttgattttggagctaactttaaccatggcaattacatccagcttcctttgcttgagctggacgatttgatgtggatttgagaaccagctgtcaaacagcacgtacttggcttgatgacctgctttcatagcttggtcgattaaattaaccatcacgtctgtgcctttagtccgggcaagcatgcgtcttttgccagcaatggtgcgctgatcacagactttgttttcgccaatcatattctgtagcttgtgagaggacagcaacaccgaattgattggcatgaaagaagctccatcagtccagcccagggtcatcatgcgaaaacctttcttgtaagtcattgatacatggtcaaaaactttggcgactaattctgttttcttgaagccggtcctagagaagtaggaatcatcgacaacaaagcaatcagcccgtttttctgaagtcaaagatcgcaagtgattattaatgatttgcgcagaaagcagtgtggtgaagtggagccaattgacgtggacgttgcgcataaatcggtaataagaatttttagaaaagctttctttaaaatgatccgttttcagctgcatatataagctgcggtcacgaaagacattgcttaaaacgtaaagaaacaagctgaacaggctaatgcctttttccttgcggaagccacattttctcaacagcttgatcacctgaaacttcttgatgaagctgatgattgagtttgaaaatagttgttcatttttttggtcaggagatggtaaaatagacattggcacaagcctttcatgcatagaattatcgtttggtcactttaattatagcaatgaaaaggtcatgtgccttttatatttgttaaaaaacgcagaatcacaataaaaggagcgattctgcgtgtgggaagtttaagtaaattattggaaattatcggcataaagtaaatctattttttgatgataggatataatttatgtataagtgaaaatgaatagatataaagaaagaagataaataagaatggttaaaagtattacacctcatttggtttatcacttgaatgggatgcaccatgttgtagcacaagttggtgtagtaaatggtgatcatgtttttgccttgcaacttcttcacagtgcacatgatgtgttggtttatagaaaacatgaaggtttaaccaagaacatcgattatactgatccacacttagtaatgatgggctttggccacacgcaaacctgggtaccagctaatgacaaggatgaatatttcgtaggtgctaaaccaaattcaggcaactggactactcaaattgcacgagtaaagtacccaagacttttaccagaaagatatacttcaaatacacaacttccacgtttgtcacacttgaatcacgtaaccgacgttccttatgatggtcatgatcacttgcacagagtagaagcttcagtttcaccaaatggcaagtatttcatgattgcctcaatttgggatgatggttcaggtcactttggtttgtttgacttaaatgaagtaaaccaaaagttgaatgaaaatggcactaagaacacgccaatcactgatttacattgcttgagtgctttccacatcgacaacttcgataatccaagtgttgctccagatgaagaaatgctacaaatgattgattcagttcaaggctatgctattgatgatgacaagaatatctatatttctaaccaattgtcaccaaagattaaccatgaaactggtgaagtaactacttggtcacgtaagattgttaagttcccatggggtgaaacaaacagtgataactggcaagtagctatggttgatggtattgatttaccagatcgttacagtgaaatggaaagtatccatgttaatgccgcaaatgatatttacttaactgtggcttaccaccaaaagtacattaagggtggagaatataagttaagaactttggaaaaccaaattttccatattactgatttgtagaataataaaaatttaaccaagtaaaaaagtgctgatgtgtctttgcttatgaagactatcagcactttttattcatattaatcagtaattctttctttaccaacagcacgttgttcggaaggattataacctaactcttcaatttcttgtcttttttctttgttattgatttgagaaagaatatcccaaaagttagacttatttttcttaatttttgaatttctgttagttttcattgttgttgccttcattttcactttctataaatataagtatactctgaaaaccaaatctatttttagctattaagatcgattaattcaaaatgaaatattttacaaaaatatatgcaatttatatgtaaatgatatacaatagtatcaaattcagaaaggagtaaaaattatggcagaaaaaacaacaggactttatgtcagaatgaatccagaaaagaaggaaaaggcagaagctattctgaaaaagctggggttaaattcagctacggcaattaacatgttctatgatcagattattcttcataatggtattcctttcagagtagagattccgaatgcatgggataatttagatcaaatgaataagtatgaatacgccaaactgcttggcgagcgcctgaacacattgagcggaaggaaagatttgcttggagatgtcgccaagaggcttgatgcggaaaagaatgaaaagaaagacaactaagttttgaggtaaaaattatgatggcaagaattattattggcattattgttgttttagttattgtgtatgtttgttgtggttttagaatcgttccacaaaataatgaaggtttggttgaaaccttgggtaagtattctaagacagtaaaagctggatttatctttgtctggccacttttccaaagaattcgcaaagttccattagcacttcaaccacttgaaatttctaagtactcaatcattaccaaagataacgctgaaatttccactagtttaactttgaactacttggtcactgattcataccgttacttttacaacaacaccgactcagttgaatcaatggtgcaattaatccgtggtcacttgcgtgacattattggtcgtatggatttgaacgcagcccttggctcaactaaggaaattaacgatcaacttttcactgcaactggtgacctgactgatatctacggtatcaaggtcgttcgtgtcaacgttgatgaacttttaccaagtgctgaaattcaacgtgccatggacaaacaacttactgccgaccgtgaaaagactgccgcaattgctaaggccgaaggtgaagctcgtaccattgaaatgaccactaaggctaagaacgatgctttggttgctaccgctaaggccaacgctgaagctgttaagacgcaggctgatgccgatgcttatcgtgtacaaaagatgcaagaagctttgtcaaaggccggcgaaggatacttcagaaaccagagtttagacagcttcaaccaattagctcaaggtcctaacaacttaatcgtggttggcaaggatgaaatgactgacttgggtaaggttcccgctttgaaaaaggtgtgggatgcaagcgacgataagaaagatgaataaaaattagctcaattctcaaatgaggattgagcttttttatacttttaacgtataccagcatcaatattaagtaattttcacactctcttgctcgccttatacttgtagtaacaattgagaacaagaggggaaagaaaattatgtttggtcgtacttattcagatttaggtccagttgttggacaaattaatggtgaagatattcgcgcaaatcaattagaaagacgtggctatgattgggaaaatggttatggcactccatccgatggccaagatactaatcgtgatggtcaaccagttagaaaattaactaaagatgccaaaagcattattatcttttggtcgtgttccggttcaactaagttgctcgcaagtaaagttgcgtgtgaaaccggtgctgatattttagaaattactttaagaaatccttatccagcaaattaccgtaaaacgctcaatcgcgctaactgtgaaagaattcaaaatgattcatcagagcttgagatgcagttacccgatttgagtcaatatgacacaatttacttaggctatcaaacttggacaatgactttgagtcagccaatgaaggcattcctacttgaatatggtggcgaattttctaacaaggagattgcgccattcctttctgaaggtggatatggttcgggtgatagtactgaattgatccgtgagtttattgcacgtgatggtggtaaaaataaaaaggtcgattggacatttgttggtccagaaaatgtcctttgtgctggcattactgataaatttgaaaaggcaggacaaaagattttcggccctaaccaaagaacggcacaattagaaggttcaaaggattatgctctgcgctttatgaacaaatatgatgttccaactgctcgccatgaaactttcaccagcgctgaaacctgtattgccgggttaaaggattttgcatatccggtggtgatcaaggaagatggtttagctggtggcaagggcgtaaccattgctaagaatcaagacgtcgctgaagaaacgatcagagaaatgtttgcaggtggccaaactgctgtcgtgcttgaagaatgcttggttggtccagaatactcaatgtttgtggctgtttctgaagatcaatttaccattttgccaatggcgcaagaccacaagcgagttggcgatggtgataagggtcctaacaccggcggtatgggatcatattctcctttgccacagttgaaaaaagaagatcgtcaaagaatgatcgatgagatcgtgaagccaacgatgaatggcctggttcaaggcgattatcactattgcggtgttttatacatcggcttgatgatgacagaaaatggcccaaaggtcattgaatataatgtccgcttgggcgatcctgaaactcaagttgttttgcctcgaattaaaaatgattttgccatggtgattgacgcagcggtaaatcatgaaaaattgcctgagattgaagaaaatgataattctatcttgggcgtggttgtctgcagtaaaggctatccagcgcacccggcacctaacgtgaagatcggcaagttgccagaaggtaccaatacctatatcgattatgccaatgtgaaaggcgaattggataatctgataggtgatggtggtcgcttgttcatggtgatttcggaagctgacaatttagtccaggcgcaagataatgtgtactcttatttgagtaagcttgatctgccagattgcttttaccgtcatgatattggtaatcgtgctttgagagattagatgtgtgaagaaagtcccggttggggcttttttagtttggtttaatacgaacacttggtcgtatttgatgggatcaatgataaaattttctccacataagtggaggttttgaggatcagtcgtctaacgggcaagacaggcttagttaataagcaagatatgggtccaattcccgtcgtccttaatatttgaataaagtaaaagctcttagttgtgaaaactaagggctttttcgtttacctaaataatttcctataaaagatctaagtgttcattctgaagatttctaatttcattaggtgtatgaccatatttcggagactgtaaaatagtttgtgtaaggatgaatgattccttaaatttatttctttaaacattagaaaaaggggttcctttctcgtatgattggtttgaacaaaaaaacacatacagaaagaagaactccttcatgaatgattttaccaaagattttgctcaagctctattcaatccagacaaaataaatgatttattgcgcaaagaactacaacaggctgttaataacttgttagaagctgaattgaccgcctttctgggctatgatccctatgccagaaatggctggaatactggcaactctagaaatggtgcttatttccgcaaagttgatacgcaatttggcccaattgaagtgcaagtgccccgggatcgcaacggtcaatttcatcagcacacgctgcctgactacaagcagcactcggatatcttggaaagcatgattatcaagctttactccaagggcgtgaccaccagggaaatagccgatctaattgaaaagatgtatggcagccattacagtccagctcaggtatcaaatatttccaagcagatgattccaaaggttgaggcttaccacaaacgcaagctaagcgacaagtttttctgcgtctatttggatgcgacataccttcctttgcgccgagaaacatttgagcgtgaagcagtctatattgccattggcatcaagcctaatgggcacaaggaggtcattgactactgcattgcacctagcgagaacattgaagtctggacagatatgcttcaaaacatgaaatcccgaggcttaaagcaagttgagctttttctttctgatggtgttgttggcatgaaaacagccttgaccaggacttatcctaaagctcattttcaacgctgtttggttcatgtcatgcgcaatatctgcgctaaagtacgcgtcgacgatcgtgaaaagatcatgaacgaattcaaacaggtgcatcaacagacaaacaaagaagaagccacagctgtcctgcatgacttctataccaaatggggcaaggtttacagccatgttatcagaagcttgaaagacatagaaccagatctgctggtcttttataactatcccaagcagatcagagcttcaatttattcgactaacatgattgaatcatttaacaatgtgatcaagcgcaaagctaagcctaaggcagagtttccaactgaacagtcgcttgatgcttttattggcattcaggcaatgagctacaatgaccgttatttcaatcgaattcataaaggctttggtcaggttcaggacaccttagaatcctactttgattaaataaataattaaaaaatcaatttacgagaaaaatctatttacacaaaagatctaagtgtataattttttacggtaagttgaataaataattaaaaaagcccaagtcctttgaatttggacttgagctcaaacaaaaagaccagtagtctgatgttaagaacaaaaaacacattagaagctggtcttttatgaattcaattgtaactgaaatcgcaaatattataaagtctgaagataattatattaagcgtgaaagaaaaataatctgtttcttcttaaacctgattaaggaaatcatggccttggctttagctaaagttgatgatgaaatgattaccaaggttaaagcacagggctatcagattgataagaagaatgagcgctcaatcaatatggcttttggcgaagttaggtatgtcagaagaagatatgtctgcccaggcaaacaagcaaggtatcccttggatgaattaatgggctttgacaaatacaagcgctacagtattttagcagtcaaaaacatcttagaagtaagcagcgttgccacttatcgcaatactgctctagcagtcaattgcctgtctggctttaatattagccatatgcaggtgggcaatttggtaaaaatggccgggaaaaatattaaagcgggccaagaagcagattcaagatatgatgccgcaggcactaagaaaaaggtcccagttttgtatcttgaaggcgatggcgtggtgatcaaaggcactaaaagccggttggaatttcatcgctatcaggtctgtgaaggcattgtcaatataagcaagaaacgcagaaagcgaatcaatgccaaggaatttgtttctttaagccgacttgatgcgctgaacgaagccaaggagtacctggccaatacttatgatctttctgatactgtaattcttagcaacgccgatggcggtgctggatatgccaaaacagacttcgatgacattgtagggctatgcaagcgtcatgagcatttcttggatgtctttcacctaaataagaaaatcaaagaaaggctatattttgcgcctgacctgcaaggcaagctgatttctgctttggaatacaaatacagctatgacaaagttaaaactatcctaaccactgcagaaagccgactaattgatgaattgaataccgagctcaatcatgattatctggggcgcctaaggaattatattgatcgtcattgggacgatattaagccgtttaagaaacgaaaactgactgtgactaaagccattggctgctgcgagagcaaccaccgcaagtatacctaccgtgttaaggggcaaggcaagaaatggtcaaaatctggagcagaaggcatgcttaggatcttaagctgcatcaagaatcgagagctggaattttggcttagcagcgagtttgaagattcagaaataactgtattgactgaacaggaattaaaagcagcggcccgtgacagcttaaagaagcgtcatgaagttcatttaggcatccagcatggcgcattaaccgcacaggtagctggcaatagttatttaagcaagctaagcagaaatttaagtcatataaatatttaagaaattaaggttagactaatggtttaaaggctaccgcaaaaacattgacacttaccaaaagatttgacagtttcaatattctggattaatctatattttgcttataataaaagcaatggtaaatatttatttttagttaatgaaaggcccaaaaaatatgttatctaaaagaaattatcaagaacgtcttcggaagatggcaccaaaaaaagagcgtttttctattagaaagttttctgttggagcagcgtctgttttaattggatttactttcgtgagtatggctggaagtcacaaagttcaagctgcagatgtagctgataaatctgtagtagttgacactttcaataaagataagagtcaagagctaacagaaaataagactattgaaatgccaaaagcagaaaaaacggctgttagttctgtagtacaaaaaggtgcctctgcaaataaaattgaagcagaaaatactacacaagttgataaaaatacagaaggttctgtaaaagcacagtctcaatctaatgaagctgtaactaagaatgcagcagaatcaaaagtagcagcactacgtgcttttagagcagcacctcaagctactcaatcacaagatgccaatgatttccaaagcttagttaatgccatgaataatagtagcattggaactattaatattaccaatgatattactattaccggtaaagttaacggccttactacttctggtataagtaatataaacaagcactacctttatctgcagtctaaaggttcagctcgtgacttaacaattaatggtaatggtcacactatcaactttgccggttacagtattgctttacaagacgagaactaccacaatgctgctggcccttggaacattactttaaaggatatgacgattgagggtagtaagtatggctattcaccaatttcattctatagcagcaagactaatactgaaaatagtaaattaatttttgatggtgtcactgctaacttgaatgatcgtccattagttgacaagtatggtgaaaacttaccagttcactttgccggtgataacaacattatgcttaataatatgtcaattggttacaatctagtaactggtaagactgtaaaatttgactctggtaatactacttttaatgttggtggtaaagtaactggaaatgctattaatcctgacaactgggtaattcgttcaactgaaaatgctagtaatagtgaaaatccttcaactttaattaatgaaggtgcaactgttactattaatgctaaatcagacgacttacgtggtatttatgctgggcgtcaactaacagctggtcagccaatctatggcgttactgttattaatggtactttgaatgccaacatggcagctggtcactcaactgcaatttggtcacatgatcttgaaattggtaaaaagggtaatgtaactatccataccaagcaaacaaatcaggctgatggtgttgaaaatggtacttctaattcagtaactaattataatggtacccactatgctccaatttcattaggtgttggtccaataagtagtgttgccagtccattatctaagcaaactgccagcttaattaacaatggtagtttgactattatacgtgatactactgaaaggacattggtaccattaatttcaatgggtgacggtggtttaagtactaataccacgttgaaatttggggttggtgccggtgctactctcgatttacaagacaatgcaggtacatttcaatatggtactgaacctaacacaccattgaatggtttgattactctgtggggtacgagtggtacagatttattggaatttcttaccccagcatatgtcaacttacaacgtactggtaatattcgtggtacattgattagaatggaaggtgtctacaacagtactactgttaatggaccaacaccagtggctcaatgggatcaaggtaataagactactattcctaatgatgtttggtatgtaagatacctgatatctgcgaaccaatggggtaataactctggtcaatttatgagtaaagatcaacatcctaatactgtcgttgcgcataaaggtgttgatacactttataactctaatgctactgtcttaatgtctaagaaccaaggcgctgataaatacgaaaacggtacaatgccaactgaagtacaacaggcactgcacttgaacagcttcttaaacaactttaacttgtggcgtccacaaagaatgtctatgggtagcaagttgaatgatagtcctgacgttaagattgatgattttgataagtatcacccagaagtgcaaacgattgatggaactactcgtcaaacattaagtgatcttgatgctaataagggacttaaagatttaattggtcctgatgaacaaccaatcactgacttcaagaatattgttaagcatgttacttggtacaattctgcaactgataaggatgaatggaacaagatcatgatccagccgactgacagcaaggatccaagtgcccgagttccttatccagaaccacaaaacccaacaggtaatttaaagactactgatggttttgctgaggctaaggtaacttatgctgatggttcagttgactttgttaagattccacttaaggttactgaaaagaagtatagtgaagaattaacaccatcttatcctggtgtttccgttgagcaaggtaagtctgatagcgtagatccaagctttaaggatgaaaacgataaggctgctgatgctccagcgggtactaagtacactgcaggtaaaaatactccagattggattaaagtagatcctgatactggtaaagtaactgtttcaccaactgatgatactagtgtaggttcacatgatatttctgtaacagtaacatacccagatagcagcactgaccaattaactgtaccagtaactgttaccgaaaagagtaacttagctgagaagtatccagttagctacgacaagttaaatgttgaaaaacctagcggcgacacaccagcaactggtgcagtagatccaaaggctgctgcagatatgccagaaggtgcaatcactggttacgaaaaaggtgactttgatgctccagcgggtgtaactatcgatgtaaatcctgatactggtaaggtaactgctagtgtaggtaaaaacgcaacattaggttcatttgaagttccagttaaagtaacttatagtgacggtacttatgctgaagtaaaagttcctgtaagtatcactggtaacaaggttgatccaggtagtggtgacgttgtttactacggtgatcaaagtatggtggtcttcaatggcaaccttactactgttcacaagactactgatagccatgaattaagtgctaaagacagtgccttccaaacaatcacatattactctgattggaacaagaaaggtaacatcgttagcgactataacaagcatgtgatttacaagctaagtgctgatggtactaagtatgtaaacgaagctgatgctacggacagctttgatgctagtgcaattagctttaactggcagaagggttatggagttaacactggtgttgataactttagcaatggttctgcagacacactttaccaacttgaaaatggtgctgttaactctgaagagcaaactgatgccaatgatccatcaggtttagcaggtaactctaagtatcgttacgactttagtattagtgatactaatgtattgcaaaaactaggtttatcacctgctggttacaatgcttgggctaatgtttactacaacttccttggtgcaactggtaaaattaatattccagtaaactatggcagtgaagtatcaactgatgaagctggtattaagaattacttagcaactaacagtatctcaggtaagacatttgtcaatggtaacccaactggtattaagtgggctgaaaatggtatgccaggtaaagatggcaaatttgctgcttctaacatgactgggattgttgaatttacttttgataacggtactaagttaaatgttcaagtaacatttaagactggatcacatgttccaacttcaggtagtaaagttaatgacgatactaacctttatgtagaacgtacaattgaatatgatgtaactggaactggtcattcaccaattaactcagtaacacaaaaggttcactatgtacgtgatggataccacaagattaatgctgatggtacagatgctggggaaattatctggaatgaatggaaactggctgatggtcaaactgctgaattcccagaatacagtgttgaccaaatcacaggctatgatgcatatatcaatggtgcaaaggctactcaagttgatgctgccaaagttgctgaaacaaatggcacatcacaaaatggtcaaaacatcacagtaacttacaaaaagcaaaatagtactccagtaccatacaaaccaggtaaagatggcgtaaacgatgccattaacagatatgtaactcgtacaatcatcgttaaggaaccaggtaaagaaccacaaactattactcaaactgttcacttcactaataaagataaagatggtaatagtggctacaaggatccagtaacaggcgagattaaatacaatactgactggcatgtagcaagtgatttgaatgctaagactggtagatgggaagaatatacagcaccatcagtaacaggttacactccatcacaagctaaggtagaagcaaaaacagtaactgcagaaactaaagctgctagcgtaacaattagctacactaagaatgcagatattccggtaccatacaaaccaggtaaagatggcgtaaacgatgccattaacagatatgtaactcgtactatcaatgtagttgatccagtaactggtaaaattagtacaagtgtacaaactgctaagtttactcgtgaagataaaaatggtaatagtggctacaaggatccagtaactggcaagacaactataaatccatggactccggctaaacagggactacgtgctgttaatgttgagcaaatcaatggttatgtagctaaagttgatggtaatgtggacgcagtagttgtaactcctgattcagctaatatggtagtaactattacttaccaagctaataaaccagaaggtcaaaacattgctgttaagaaagatacagtaccagatccagcagatggtattaagaataaggatgacttaccagatggtactaagtacacatgggagaagactccagatgtaagtaagccaggtgatgtaccagcaatagtagtagtaacttatccagacggttcaaaggacaaggtagatgttcatattgttgtggataacccaaccccagagccacaagatgttcacactactccaggtgtagtaccagacccatcaacagccatcaagaataaagatgagatgccagatggcactaagtacacatggaaagaagttccagatgttaactctgtaggtgagaagactggtatagtaactgtaaccttcccagatggcacatcagtagatgttaaggttaatgtatttgttgatcctgttaaggaaaataacaatacaattgcagattcaaacaatactaattcttctgataagaatactgcaaatgctgcaacagttaatggtaagtcagaaaacaagaagactttgccacagactggttctaagtcagatgccgctgcaattgccggtttagcagttgccatcgcaggtagcttattaggcttaggtgttaacagaaagaaacgtcaaaagtagaagaactatttataattgatccaaagaaagattaggtgataaacctaatctttttttgtgccttaatttgttatttgatcatgtttaataattttgtaagcgtcaaataaaatagtgtacttaaaaaccgtcccagttactgttatactgagacggttatttaagttcttttatttacaatttatctggatcttctcttgccacggtaaataagcttcaagggtttccgaatccagaatctcttcattcggtaatttctgaagcaaataattcaagtacttttcaggatcaaggccatttctcttggcagtttcaattaagcttagaataaagccacttgcagtagcaccctcaaaactttgagaaaataaccaattcttccggcccatgacgagtgattttacagcgcgttcagccttattgttagataattctaaattgccatcaagcaagacatgctcaaaagtagcttgatgcttgagggtataattaatggctcttcccaatttagagcctggcaaaacggtgattttatttttctcacaccagttgaagaactcttgcatcagaggcttgagctttgcttgtcttagctggtaacgttcttgtttgctcaaattctcccaggtttgttctaagtaaaacatgcgattgcagtagttgagtcctttttgggcaagggacttttcagaagcctgttgtggtacggcttcgtgaaactttcttctaacatgagcccagcagccaactaaagttgctttcggcaattgctcataagcctgccacatatcacagtgcaaataaccgggatagtttcctaaaaagtttaaggcaaccttgccactccgggaaggatcatgatgatagagtgtaatcccgtattgatcatgtttgcctgaaaggaagacccaatagtaagtcttgattgttttactttctaagactgtataataagtttcatcggcatgtaaaattggccgcattaacagcttttgcttaagcagatcatacactggtttaaagtagtattgactgcttttcaaatcccaataatttaacatctgtcttgaaacttctagtcccatcttcttccagtcgctttcttgacgatagtccggcaccttcatttcatatttttgataaagtgaatgagcgatgagtgaagctgaacctagaccatggtttaggggagctttaggtactgcagctttaatgatcttgtcgctaagatttctttgactgcaatatttacatttgtaagcatgttggatatggtctaaccttttaagttgagctgggataaacaataattcttggcgaactgactgcttgcctatctcaatcagttcatgatgacaatcaggacaatgcttgtcgcctaattcatggtgaacctcttcagctggaagggcagctagtaagtcagcacgctttcgtttgtgagcttgtcttttataagtaatagtctgaacggcggcgtcggggacgttctccgtcatcttgagcatcaggttcatcaaagagacttgtttgtccatttaaaggcatttgttctgaagatttgccataacgtttttgcgttaagtaagctacttgttcacggaggagcttaatttcatcagttaagttttgaatagtagttgcttgttgtgcaataatcttttccaaattttcttgtgacatgagttaaacttcctcctaaatttattagttaaaagaatatcaaaaaagcgtgcgatgtcaagtgttagtagaattcgcacgctttcgtgttctttatttttggattgattgcgaagcccttcattagccagtcgacctgctcagaagataaagcttgaacttcattttgattcctgggccagttcaattttccattttcaaatcttttgtagagcagccaaaaaccttgtccgtcccaataaagggctttgaagcggtccttgcttccgccgcaaaagaggaagactttgccgctaaaaggatcaagttcaaactgttctttgactaaagttgctagtccatcaatgcctttacgcagatccgtcttgccgcaaacgatatagacttgccctaagtcactgagcttaatcatggcaagactttctcaagcagcttattcataatttcagggtctaagctgctgtaaaaattcagctctaagtcattcttctttaaactaagcaacagattattgcgtggtggacgagccttcttaggtttagaagaacggccaagtgccacaatgggttgttgtttttcgatcatattcttaacctccattaaattgatgagattagaatacctgaaaaatacggactaaaaaagatactcggttatatgacgcttacataatttttccttaataaatattcataaattatatatttatatgataatagctgtttttttgaaagtaagaaactgtcaaatcttttgtgtaaatagagaaactgtcaaatcttttgtgtaaatagatctttctcgtaaattgattttttaattatttatttaatcaaagtaggattctaaggtgtcctgaacctgaccaaagcctttatgaattcgattgaaataacggtcattgtagctcattgcctgaatgccaataaaagcatcaagcgactgttcagttggaaactctgccttaggcttagctttgcgcttgatcacattgttaaatgattcaatcatgttagtcgaataaattgaagctctgatctgcttgggatagttataaaagaccagcagatctggttctatgtctttcaagcttctgataacatggctgtaaaccttgccccatttggtatagaagtcatgcaggacagctgtggcttcttctttgtttgtctgttgatgcacctgtttgaattcgttcatgatcttttcacgatcgtcgacgcgtactttagcgcagatattgcgcatgacatgaaccaaacagcgttgaaaatgagctttaggataagtcctggctaaggctgttttcatgccaacaacaccatcagaaagaaaaagctcaacttgctttaagcctcgggatttcatgttttgaagcatatctgtccagacttcaatgttctcgctaggtgcaatgcagtagtcaatgacctccttgtgcccattaggcttgatgccaatggcaatatagactgcttcacgctcaaatgtttctcggcgcaaaggaaggtatgtcgcatccaaatagacgcagaaaaacttgtcgcttagcttgcgtttgtggtaagcctcaacctttggaatcatctgcttggaaatatttgatacctgagctggactgtaatggctgccatacatcttttcaattagatcggctatttccctggtggtcacgcccttggagtaaagcttgataatcatgctttccaagatatccgagtgctgcttgtagtcaggcagcgtgtgctgatgaaattgaccgttgcgatcccggggcacttgcacttcaattgggccaaattgcgtatcaactttgcggaaataagcaccatttctagagttgccagtattccagccatttctggcatagggatcatagcccagaaaggcagtcaattcagcttctaacaagttattaacagcctgttgtagctctttgcgcaataaatcatttattttgtctggattgaatagagcttgagcaaaatctatggtaaaatcattcatgaaggagttcttctttctgtatgtgtttttttgttcaaaccaatcatacgagaaaggaactcctttttctaatgtttaaagaaataaatttaaggaatcattcatccttacacaaaatattttacagtttcaaaaatgacaaagtaaatttgcaagaatagagttttattttaatattaatatttactagatatagattaagcaatgaaatgatgattttaaagtggtatgacacagattataaaacaggacatctgagaagcggtaatatggttaccatatttatgctgatagccactgttgccaagattgaagtaatcttaaatagtaatccacattggtgccttccaccatttaatgaatttttgtttagtagtgagataaagcgtagtgtgtttaagcctgatgatgagttgaaacaatttattagagattttaataagaaacaccaaaaacaaaattgataaatttccacttgtaactactattcttgtttaatatcttttgatatagttttaaacaagaggaaaaacaaatgttttgtcttaaatcattatttaactcatgagaatgtaaatacgataagcaatggtttaaaatcttcacgacgtccattttttatttaacttaagagaattacaattaaagctccaatcggggcttttttctttttcattaaacttcctattaaaagattacccttgaaactggtaaaatagataagtaagtatagagaacaatttttataaaaggggaataaaatggcagataaaaaattacttctaatcgatggtaactctgtagctttcagagccttttacgctctttatcgtcaactagaatctttcaaaagtccggacggcctgcacactaatgccatttatgcttttaaaaatatgcttgatgtccttttgaaggacgttgatccaactcacattttggtagcttttgatgcaggaaaagtaacttttagaacaaagatgtatggagaatataaaggtggacgtgccaaaactccagaagagcttctcgagcaaatgccttatattcaagaaatgcttcatgacttgggtattaaaacttatgaattgaagaattacgaagcagatgacattattggtacttttgtcgataagggtgagaagaacggctttactactactgttgtgactggtgaccgcgacttgactcaactcgcttctccaagcactactgttgaagtaaccaaatcaggggtttctcaacttgaagcctacacgcctgaacatatgaaggaagttaacggcgtcactccaactgaattcattgatatgaaggctttgatgggggataattccgataactatcctggtgttgaaggtatcggtcctaagacagcctctaatttgattcaagaatatggttcagtagaaaacttatacgatcatattgatgaaatgaagaaatctaagcgtaaagagcgtttaatccgtgacaaggacaaagcatttttagctaaaaaacttgccacaattgaccgtgattcaccggtaactctagatatcgatgatataaaacgtcagccagttgattatgaaaagctgcgtcaattctatgaaaagatgaacttccgtaagttcttagctgatttaaatgcttcaggtgccggtcaagatagtactgaagttgaaaaagtggaatacatcgttttaaacgacgacaacgttaaggatgttaaggctactgaagatgacaccattgagttttatctagaaatgctcggtgctaactatcacttagctccttttgttggcttcagcttgaagatcactgacaagatctacgtttcaagagacgtggaattgcttgaagaagataatatcaagcacatcttagaagacgaaaagattaagaagaatgtctttgacctgaagagaacaatggttgctgcacatcgtttggacattcacactcacggccttgattacgacatgcttttggcatcctacttgatcaataatgaaaataactctaacgaccttggtgaaattgcccacctttatggtgattactccgttaagactgacctcgaagtttacggaaaaggtaagagcgagcacatccctgatgacgatgatgaattattcaaccacttagcttctaagatcaatgctatcgaatcacttaagaagccactgcttgaaaaactcaaggatcatgaacaagacgacctatttgaaacaatcgaaattccaaccgcgcgcgttttagccagaatggaaatgaacgggatgaaggttgaagcaagtactttaattcaactgcaaaatgaatttgccgttaaattgaaggaactcgaagacaagatttacagtcaagctggtgaaaagttcaatttgaattcacctaagcaattaggtcacattttgtttgaaaagcttggtttaccaccaatcaagaagaccaagactggttactcaacttcagttgaagtcttggatcaattaaagacgcaaagtccaatcgttagtgaaattttggattaccgtcaaattgccaagattcaatctacctatgtaaagggtctgcttgacgttatccaatcagatggccgtgttcacacgcgttacttgcaaaccttgactgcgactggtcgactttctagtgtggatcctaacttgcagaacatccctacccgcaccgaagaaggaaagcaaatcagaaaggccttcgtgccaagcgaaccagacggctacatcttctcttgcgactactcacaagttgaactccgtgttttagctcacgtttcgggcgatcaaaacatgcaagaagccttcaagaccggatacgatattcactcacacaccgcgatgaagattttccacttggattcaccagatgaagtaacgccattgatgaggcgtcatgctaaagccgttaactttggtattgtttatggtatttctgattatggtttatcaaagaatttaggtatttctagaaaacgtgctcaagagtttattgacaattactttgaacaatatccacaaattcgtgaatatatggataaggctgtgcaaacggctcgtgaaaagggctatgcagaaacaattatgcacagaagacgctacttgcctgatattcatgctaagaaatttacagttcgttcttttgctgaaagaactgcgattaactcgcctattcaaggatcagcggccgatattatcaagattgctatgatcaatatgcaaaagaagctagatgaactacatttgaagaccaagatagtcgttcaagtacatgacgaattgatttttgatgtgccaaaagatgaattagaaacgattaagaagatagttccagaagttatgcaatcggcagtgaagcttgatgtgccattgattgcagattctggttggggtcataattggtatgatgcaaagtaggtgatttaatgccagaaatgcctgaagtcgagacggtgcgacggactttaactccgctaatcgttggaaaaacgattgaaaaagtagtactttggtatcccaaaattgtggcaacagaccataagaaatttatcaaagaactaccaggtaaaagggtcttaaagattgatcgctatgctaaatatttactgatacgcctaagtgataatttaactattgtgtcacatttacgcatggagggaaaatatcatttaaccactcccgatgcgcctaaggataagcatgaccacgtagagtttatttttactgatcaaactgccttgcgttataatgacgtgcgtaagtttggccgcatgcagctgattttaacaggtactgagcgccaagtgacggggattggcaaactgggccctgagcctaatagcatagaattttcgtcagattattttatcaaggccttgagccgtaagaagaaaaatattaaaaatgtcttgcttgatcaaacaaccgttgcaggtttaggtaatatctatgttgatgagacactgtggcagagtggaattcatcctttgagtgccgcaaataaaattccgtcagaaaaagcaaaagagctgtggcagaatattaaccaaactattaaaattgcaacaaaaaagcgtgggacgactgttcatacttatttagatgccaacggaaatgttggtggctatcaagaaatgctcaaggtttatggtcatgcaggtgaaccttgtgcaaagtgtggcacggaactagaaaagattaaagtatcaggcagagggacaaccttctgtccacattgtcaggtggtttattaatgagctatgttttagccttaactggtggtattgcaactgggaaaagtacagcggaccagttttttaaagcaaataaaattcctgtgatcgatgatgatcagattgctcatgatttgatggagcctgggcaagcttcttggcaggcgattaaagattattttggctcagagtatttaaatgatgaccaaacgattaatcgaaagaaattagggcaattggtatttaaggattcgcgggctttaactaaattaaatgagttaacgcatccgttgatttttttgcaaacaaagaaattgctaaatcaatatcaagctcaaccaatagttattcttgatgtcccactttattttgagtcagggatggataagaaagatatagctgacggtgttttagtgattactttgcctgagaaaatgcaattacagcgtttgaaggagcggaatcatttaaccgatgaagaagcaagaattcggatgcaaagtcagttgcctatggtcaaaaaagagcaattggctgattttgtgattgaaaatactggtacaataaaagaactagagaataaactagcacaattattggtaaagattagagaagagggatagctatggaatgtccaaattgtcatcaaaatgcttctcgcgttattgattcgcggcctagtgatgaaaaccgggctattagacggcgcagagaatgtgaaaattgttgttttcgctttactacttttgaacgagtggaaactgctcctttgttggtagtaaaaaatgatggtactcgtgaaccattcagtcgaaagaaaattttgcacggagtaatggcagccggacaaaaacggccaatcagtagtgaacaatttgagcaattggttgatcgtgtcgaaaataagataagaaaacaaggcgttagtgaaatttcatctaagaagattggtcagtatgtcatggatgatttggctaatttggatgacgtagcttatattcgctttgcttcaatttaccgtgagttcaaggatatgtctagctttatgaagacaatggaagatatgatggccaaaaaaggaaagggtaattagtcatgtttgcaacgtctgatcctaagcatctttattatgtagccaacaagattaccctttttccagagaatgagaaaatcttgattaaactgtatcagcctttggttggcgcggtggcaattgccttgtatcagactttaatcaatgactatgatccatatggtattgtttctgatgcaaagggaatttattcactacaggagcaacttgattgtagtttaaaagatatgtttcattctttgcataaactggaagccgtaggtttagtgcaaacttttttagcggataatgtcttcaataatatcattgtttttaagttattacaggttcctagtgtagacaaattttttgcaacaccactgctagcaagtttgttgaaagaaaaagttggcagcccaacctttcatgacttgagtcatgcttttgctaaggaagcaaaactgcgtgaaaagccaatcaagaatgcgcgcgatgtctcagccaacttttttgatgtttttcgcttgccaggggatgaagcaattaatccatctaatgaggtagtagaagctgcgcaggaaaataaagcgcctgaggtagaaactgctgaaattaatgcccaggatccaattgattgggatctgattaaagatcaatataatgtctatcaaattccagctcaagaagtagaaattaaaaagaaccaaattcggggcttaatacagacatataatttatcggaacaggaatttgtggatgagactgttccctgtttgcatggtacacataaattaaacatgcatgaaattagtaataccatagcagaaaattataaacgattgcatactagggaaaacattcaaaaacaaattgaagaaggcaaaaagcgcgctattgcgactatcaaaggtttggacgctaatgatagaaaactgttactcgaagctaatgaaaattccccatctgaatttttatacaaattaaaaactgaaaagggtggaattgtagctccaggcgaaaactatattattaatcagctgcacacgcagtatggcttgccggaagatttgattaatattttgattcatacctgtttgacctacgatactgttgtaacttctaatcgtgcttatcgaatagctaatgattggctgcaaggtggtattagtactggggtacaagctcttgaatatgtgaagaagcgtaaagccgatattcttaaaaagaaaaatcgacagtcatatcgacaaaataagcgagtcgaaaaaggtaccgattggagcaagaaaaaggctaaaaatgaaggtatgtcaatagaacagctgaaggatatctttaaggatctgaaaaataagtaaatagagggtaggtgaaataatggaagcaattggtgatttgcttaaaaaaatagttaaagagcgtaatttaggtaatgagaaagaactgttgaaaactgctttacacgatccagatgtgcaagcgtttttgcaggcaaatagggaaaaaatagataaggcgatgattcgaaatagtatggccaatatctatgaatattatgcgcaaaaacatagtcagaatcaggtgctggccggttatgctccgcaattatttttgaacggcaaagtaattgatgtacgttacaaacctaccgaggctaagattgtagcagatcagcaacgagcagccaagcggcgtcttcatttaattgatctgcctgctaaattgcatgatgttaatttaagtgatattgaggttacaaatgatcgccagcaagctttaaccctgatttatgattttttgaaaaagtacaaagctgatcctcaccaacaaggcctttatttgtcgggcgactttgggatcgggaagacctatatgctagcgggacttgcaaactatgtagcaactaattttgatcggaatgttgtatttttacatgttccaacttttattgcaggtttatcaagtcattttggtgataacagcttgcaagatgagatcaggaatttagctgaatgcgatgtcttaattttggatgacattggggcagaaacattaagtcagtggtcacgtgatgacgttttaggagtaattttacaggcaagaatggataatgttttgccaacctttttctcttctaatttagatatggaagcattagagtcacactttgaggaaacccgtaatgcaactgatccagttaaagctaaaagattaatgcaacgagtacgttttttagctaaagaagtagtagtttccggtcccgatcgacgaaatttttcgcattaatttcaaaaagttcttgcatcgttcactttgatgcgtataattgaagttaattaaacgagacatgatgatgttcggctcagagagaaggacctagttctggaagttcttcattagaaaatcaccccaatcgtttattcccaaaattgaattttaagaggctggatacctttatcaatctatacgagaggttagacgtacgctaacctgaattttgggtggaaccacgcaattaacacgtcccagtgcttttattagcactgggatttttttattggaggtaaaaatatgagtttttcaattactttgccagacggttcaaagaaagattttgataaggctgtttcagttaaggaagtagcttcatcaatcgctacatctcttggaaaagctgccgttggtgctaaagtaaatggcgttgttaagccacttgattatgaaattgacaatgatgttgaagttgctattcttactgacaaggatgaagaaggcttagacattttaagagctactgctgcttttgcacttgaagcagttgctaagaacaagtacccagaacttcgtttgggtcaacatgttgctgatgaaggcggcttttacgtagatactgacaaagatgaccaaattaaggttactgaattgccagaacttgaaaaggctatggaaaaattagttaagagtggtcaagcaattgaacatgttgtaatggacaagtcagaacttgaagatattttcaaggatgacccttacaagactgatcttttgaagaaaattgatgctgacaaggttgatgcttacaagttaggtgatttcgttgactttggctttgatgctttattgccaaacactggtaagattaagcacttcaagcttttgtcagttgctggtgcttactggcttggtaaatcatccaacccaatgcttcaaagaatcttcggtactgctttcttcaaggaagctgctttaaaggaagatttgaagcgtcgtgcagaaattaaggaacgcgaccacagaactatcggtcgtgaccttgacttcttcttcgttgatcctaaggttggtgctggtcttccttactggatgccaaagggtgctactattcgtcgtgttgttgaacgttacattatcgaccgtgaagttgctgacggttatcaacacgtttatactccagtattaatgaaccttgatgcttacaagacttcaggtcactgggcacactaccgtgatgacatgttcccaccaatggacatgggtgatggcgaaatgcttgaacttcgtccaatgaactgtccttcacatattcaaatttataagcaccacattcgttcataccgtgacttgccacttcgtgttgctgaacttggtatgatgcacagatatgaaaagtcaggcgctttgtcaggccttcaacgtgtacgtgaaatgactttgaatgatggccacacttttgttgccttggatcaagttcaaactgaattcgctaagattttgaagttaatcatggacgtatacaaggacttcgatattactgattactacttcagactttcataccgtgatccaaagaatactgacaagtactttgcaaatgacgaaatgtgggaaagaagtcaaaagatgcttaagggtgctatggatgaccttggccttgactatgttgaagctgaaggtgaagcagcattctacggtcctaagcttgatattcaaactaagactgctttgggtaatgacgaaactatgtcaactatccaacttgacttcatgcttccagaaagatttggcttaacttacgttggtcaagatggtgaagaacaccgtccagttatgattcaccgtggtattgttggtactatggaaagattcattgcttaccttactgaaatttacaagggtgcattcccaacttggcttgctccagttcaagttaaaattatcccagttaaccttgatgctcatggtgaatatgcagaaaaggttcgtcaagaacttgctaagcgtggcttcagagcagaagttgatactcgtaacgaaaagatgggttacaagattcgtgaatcacaaacccaaaaggtaccttacactttggtgttaggcgacgaagaaatgaagaacggtagcgtaaacgtacgtcgttacggtactgacgaagaaatttctaagagccttactgattttattaatgaaattgatgcagatgttaagtcatactcaagagaaaattaattaatataattaaaaaataaaataaaaaaacgtatgctatgccaggtctaattaagatggctttattgcatacgtttttttggtaaagctaatgtaattgattttttacgtttgtaagtaagaagtaaaagaactgtcatcccctttaacttttatgaaatattttaatgaaataatgaaaataggagttatataaggaaaggtgataaacttgaaaaataagctcattatatttatgacaactgcgctattcatgttagctattattgtaatgggtcaaaatagagtagatgctgcatcctggggagctaagaatttatttactacaccaaaggaaactcgcggaacatggtactataagcaagaaggcaaaataaagaagcttaaaattacaacgcatacatttaataaaatcaaattatataaaatgttgagcagtaatcaagcgattaagtggactaaaaaattagctaaaactgataaaaagtcggggtataaattagctcaaaaagttggtacctctcaatacgaagctactgattttaaattttataaaacagcaggttttgctgccaatggttggctttctagtgatagagctgattcaggacacacttatgttgctataaagaaaaaagataaaagtaataatgataaagtagatgcactgcggagactgtaaaatagtttgtgtaaggatgaataattccttaaatttatttctttaaacattagaaaaaggggttcctttctcgtatgattggtttgaacaaaaaaacacatacagaaagaagaactccttcatgaatgattttaccaaaaatatagcacaagctctattcaatccagacaaaataaacgatttattgcgcaaagagctacaacaggctgttaataacttgctagaagctgaattgactgcctttctgggctatgatccctatgccagaaatggctggaatactggcaattctagaaatggtgcttatttccgcaaggttgatacccagtttggaccaattgaagtgcaagtgcctcgagatcgcaacagccagtttcatcagcacacgctgcctgactacaagcagcactctgatgttttggaaagcacgattatcaagctctactccaaaggcgtaactaccagagaaatcgctgacttgattgagaaaatgtatggcagtcattatagtccagcccaagtatcaaatatttccaagcagatgctccccaaggttgaggcttatcacaagcgcaagctaagcgacaagtttttctgtgtctatttggatgcgacataccttcctttgcgccgagaaacgtttgagcgtgaagcagtctatattgccattggcattaaacctaatggacataaagaagtcattgactactgcattgcgcctagtgagaacattgaagtctggacagagatgcttcaaaacatgaagtccagaggcttgaagcaagttgagctctttctttctgatggtgttgttggcatgaaagcggccttgaccaggacttatcctaaagctcattttcaacgctgcctggttcatgtcatgcgcaatatctgtgctaaagtctgggtggatgaccgcgaaaagatcatgaacgaattcaagcagatacatcaacagacaagccaaaaagaagctgcagctgtcttgcatgaattttatgcaaaatggaataaagcttatagccatgttatcaaaggtttgagggaaattgagcccgatctgctggtcttctacaattatcccaaacaaatcagagcttcaatttattcaaccaacatgattgaatcctttaacaacgtcatcaagcgtaaagctaagcctaaggcagaatttccaactgaacagtcgcttgatgtatttattggcatccaggcaatgagctacaatgaccgctatttcaaccgaattcataaaggctttggtcaggttcaggacaccttagaatcctactttgattaaataaataatacgcgtggtgctagttaaatcgttttagttaataaaagttgtaggtaatttaaatagaaaagagtctgatctaattgaactatctcaagcttaagcgtttttctcaccatttacaagttagttttaatcggttaaatgtgatttgtcgctcgctatataagctttatgcgcctgatggacttaaacatcgtaaaaatgttgatcagaccaagcttcctgatagttctatcttagcgatgctcatttggcaaactgaaattggaattgaatctcaacgaagattctgtaaattcttcgttggcttatctcattctcgttttaaccgtcgagctcgaatgctcttgcctctaattcgttgtatccgtcaggcttggaatcaagaagtaaagacagctggagaatttttgattattgatagtttcccagtgccagtttgccagcctgtttgcaattatcgtgtcaagatctttcggggcgtagctgatattggttataaagcaaccaagaaagtctattattatggcttcaaggtccacgcaatagtaagcgatgatggcaattagaaaaagcattgaaagcgacttttctttgcttagttattacaacgctgagaataatcgagcaagaagtccagtaggctttcaacagcggctagaaatagctattttagcttataatatggcatattgtctagaacgatttaactagcaccacgcgtaaataattaaaaaatcaatttacgagaaagatctatttacacaaaagatttgacagtttcgcactgcgagtaggaaatggagcagataattcatttttatattattgttataagagcaaaaaattaatcaaataagttacccggatttaaaattgaagtgcaacactaattgttaaacaaaaaggccatgaagacctaaacttgaagtgaccaaaaatcaagaaaggaagatcttcatgaccaactcaaattctagcatttccaagcattatcatcaattgaacagcgaacaacgtggacaaattcaagctctgcttgattctggcataacctcctgcactgctatcgctcaagaagtaggctgtcataaatcaactatcagccgtgaaattagacgaggcagtgtcctgcaaagagacagcagctatgtcttgtatgagcactattacgctgatactgcacaaatttatcatgaaaagcgccgcagaaactgctataagtgtaatccactgcaacactatgccgtctttttcagaatgctaagcagacgctttaaagccaaatttgatgccactagcattgatgaattcgttggtgaatttcacaggattatgccaaattatccatgtcctagcacgcccactgtctatcgttatattgatcaaggattgctggatataagcaatatcgacctgccaatgaagcttaaaagacgcagaaacaaacgccatcatagtcatggtggccatgctccgcataaaaagaatcttggcaattcgattgaacagcggcctaaagaagttgaaaacagaaaagttcccctgcactgggaaggcgatttggttaaaggcgtcagacgtaaaaatcaacctgccttaatgacactgactgaaagaaccactcgttttgaggttgttatcaaaattcctgactatcgggccagtacttgtcaaagactgcttcaaaaggagattgacagacatcctaattggtttaaatcaattacgtttgacaatggttctgagtttgcggatatgaccaaaatcaaaggatgtcagatctactttgctcatccatattctccttgggaaagaggcacaaatgagaactgcaatggacttctgcgtcaattcttccctaagggcaaaagcatgaaagataagtcagctgcttatgttcaacaggcaactgatgccattaaccgcaaacatcgtcgaatcctccaatatcacacagcagaagaactcttcaagcaatacgttccttcatagcctaactgttgcacttaatttgacaattcaggatcaaataagttataataattttattgatgtgttcaactacatttttatatttttgcactgaaatcttaattcagtgcttttttcataaggattagactaaataagatgataatacgccagcgaaaaaattatttaacttctcaatttttatctaagattagtgccgatgggactttaaatattgaaaatttaattgtcctgacttgtgcaatttttattgcaagtattggactaaatgttaattcaacagctactattattggcgcaatgttgatttctcctctgatgggaccactactagcaattggcacaggtcttgctttatatgatgttcacttactgcgtaaaggaacaatttcattattagcagaaattattatcagtttagctgcatctacaatttattttcatttttctcctttgacttatgctagtcaagagattattgcacgaacttcaccaacaatctgggatgcgatgattgcgttttttggaggggtcgctggaataatcggagctcgcaaaaaagaagcaaataatattgtacctggtgtagcgattgcaacagccttaatgccaccggcttgtacgatagggtattcaattgcggcaggtaatcttaaatattttttaggatcaagctatttatttttgattaactgtgttttcataattttgactgcattcatgggtgtaaaaattatgaagtggttaagttattctactaagcaatctaagttgtttttcttgcacaagccgacctttaaagagtttgtgataattttagtagtaattattttaattattcctagtatcttgtcagctaatcagatggtgaataaaactctagtagatcaaaatgttcaaaatcttgttgttaatgaattaggcaatgttaatttaattaaggaaaatgttgatacgcaaggaaaaataattaatcttacagtttcaggcgataaaattaacgctaagaaaattcaagcggctaaagcaaacttaacaaaatatgacctgaaaggctattcactgaatattgtacaagtagctcaggttaatcccaatgcagaaaatcaattagatcgacaagtaaataatattattaatcagcgtcagcatgaacaagaacaagctgatgaaaaacgtcaacaagaacaagaaaaacgtaatcaaaaaattcgcaaactgtcatctgcaatatcttctgttactgcagttagtgataataaaaataagcaaattactttgatagagttaaaaaagccgctatctaagaagagaaaaaacgccttagtaagacaaataaaagataaatatccaaatattaatttagtggaatttgttcaagaaaatattaaaaattagaagaaactgtcaaattttttgtgtaaatagatttttctcgtagattgattttttaatcttttatttaatcaaagtagaattctaaggtatcctgaacctgaccaaagcctttgtggattcgattgaaatagcgttcgttgtagctcattgcttgaatgccaataaaagtatcaagcgactgttcatttgaaaactctgctttaggtttagctttacgcttgataacgttgttaaaggattcgatcatattggtggagtaaattgaaaccctgatctgcttaggatagctgtaaaagaccagcagatcaggttcaatctctttgagatttctgatgacatggttgtacgctctgttccacttgtcatagaaggcgtgcaagactttgatcgcagcttctttatttggctgttgatggatttgcttgaattcattcatgatattttcgcgatcatctacgcgtactttagcgcagatattgcgcatgacatgtaccagacagcgttgaaaatgagctttgggatatgtcttttccagtaccgtcttcatgcccacaacgccatctgaaagaaagagctcaacctgttctagaccgcgagacttcatgtcttgaagcatttccgtccaattctcgacgttttcgctgggagcaatgcggttaatcgatgacttccttgtggccattaggcttgatgccaatggcaatataaactgcttcacgatcaaaggttatgcgacgcaaagtaatgtaagttgcgtccaaataaatacagaagaacttatcgctaagcttgcgttgatgataggcttcaacttttggaatcatctgcttggagatgttagatacctgagctgggctgtagtgactgccgtacatcttttcaattaaatcggctatttctctggtggttacgcctttggaatatagcttgataatcatgctttccaagacatcggagtgctgcctgtagtcaggcagcgtgtgctgatgaaacatgccgttgcggtccctaggcacctgaatttcaatctcgccaaattgcgtatcaactttacggaaataagcaccattgcgtgaattgcctgtattccagccagctctggcataaggatcatagcctaaaaacgcagtcagttcagcttccaataagtcattaactgcttgctggagttctttgcgcaataaatcgtttattttgtcttgattgaatagagcttgtgccatatttttggtaaaatcattcatgaaggagttcttctttccgtatgtgttttttgttcaaaccaatcatacgagaaaggaactcctttttctaatgtttaaagaaataaatttaaggaatcattcatccttacacaaactattttacggtctcattatatctgtatattaatgcacaaatgctgttatatcaacgattagatacttcgctttataataaacagtgttattataaagatgccgagagggatagaggcaataaagaattagaatcgaaaggtgatatatatgttagatgttttaaataacaaagtagaattaagcaacgtacattttgcagaacacaaattagcaattgaagatgctaaaacaatgttagaaaacgaaggttggattgctactaagtaaaaagtgttgataattatgaaattaaaaacagaaaatgagacgcacgataaagtacctcataactgctataaattagctagtagttatgagtcgttttttattttttgcttgttatctattgatttgtagctaattctatatgacaatgatatctaaattattgaactataataaaaatccgttattttaatttggtctaagttgctatatattcaaaaaaatcgttaaatttttattatttatttggcggaatatgatatgaagaaacgtttcaaattagctgctatttttgtggctgcaatgttcgcagccgcacccgttgttggtatggcagaaacatcaactactgtttcagctgatgctgacatcatgcaacaatacacttttaatgactcagttttggactttactcctactttaaaggtttatattgctaagggtcacaaatttaccaccagtaaagaaactgcttacaaggcaaaataattaggattgattccgaaaatatagagctgttagatttaccgtggtctagcagcttttttgatgcaaaaaaataccactcaccgttaaatttagaccattcacctgaatttaataatttaacgaaaataagcaggtatactaataatcaatcaaggagggatgcaattgaaagttaaattgaatatcgatccaagtttaccagaagaaaaagctgaattttggttaaagaaaatgactgctagatttgaacggattactaaagagttgaattcggagcaggattttctttggtgctatctagatggggatgcctatgaaattaatttttctcaaatctatgcaattcaaatagaaaatgaaaaaacaatgatttgtactcaaaatcaaaaatatgtttataggggcagattgtatcaagtacaaagtgttctacctaacgattttataatgatttctagaggtgctattgttaattatcattttattgatcatctagaaattataaatacaggcaatattgatgcgcttttggagaatggactaagagtacaagtttctcgtagaagaataaaggatttaaaagagaggctaggattatgaaaaatattaaagatcttttatataacggtctgattagtggactgattggtattggtatcggtacgatctggatggctatggacttcttgttttcactaaatggtcaaaatcctgcaacagcgaagatatatttgaaaacctttcttttttggacgattatttcttttctcattggtattttcttttatctagctagctggatttttaatagtgaaaaatggtcattgaaaaaacaaatttttattaatttcttcgtctgttttgttgcctggttcttgttaaacctcctaattgataattttagtatttcactaaagatggttattagagtaacagttgattttattattatgtacgctattgcatacggtggatattttttacatttatggaacactgttagacgaataaatgcaaagttaaaggaaaaatagaataccataattaaaaaatgaaagaggtacccttgcatgactttattatctgtaaataatatttcaaaaacatatcaaaaagcacataaaaaggcggtatctgatgtttcatttaatgttgatagtggtgatattgttgccttcttaggtcctaatggtgcaggaaaaactacaacattaaaaatgattcttaatttagttagtcctgataaaggaacggttgtattcgacggaaaagatgtaactcacaacaatctctttttattgaaaaacactggcgttttattagaaggatctagaaatatgtattgggccttatcaccaatggaaaattttgtttattggggtggccaacgtggtttaagcaagaaagaggcagaaaaaagaggagaaactttcctcaaacagtttggtctgttggataagaaatacacctctattaccagattgagtagaggtatgcagcaagttgtgggaatttgctgtgctatgattgccgaaccaaagcttttaattttagatgagccaactttaggtttggatcttaatgctactcaaataatgattaagagtctgaatatgttatccgccaatggagtagggattctagttactacacatcaaatggaatttgctcaagagatagctaataaaattttattaatcaatcatggtaaacttgtcttttctaatagtataaaagatagtttgaagaagctgaataaacaagaaatttttgaagtgcatttcacccaagaacttaccgcctcagaaaaagaggatatacttgcaagctgtgaacttacaaagaagactgacggagtttatcgtttgggtgttaaaccgcaagcatctctttcacaagtacttaaattattgagtgaattaccaataagtagtatacaaactgtgactagaggattagatgaaatttttaagtactacacggagaaggaaaaatgataagttttaaagctgaattttggcgtcaattctatttatataagagatacctcttcaattatatttcagaatttttcttattaattttaatgtttatggctattttttggggcggtagccttgtaggaggtggcgttttaggaaaatcattgaatgccctagtagttggctatgttttgtggagtttaattgaaaacactattagccaaatgggatcaacagtgatgaataatgccaaaagtggtattttagaacaacaatatcttatgccaatttcttctagaagattatttttaaataaaagtattgcaaatattgttgtggcattcgtccaagcaattttaattctgatagcagtaatggcaatttctgatcactggattagttttccagtaataatgattgttccatttatattagctttactaactacagtgggattaggctatttaattgttagcttagttttacgttttaaaagaattggcagtaccttagtgatttttcaatatatttacttaggtatactactagttaattttgaaaactactccaatcttacaaaatgcttatcttgtttattgccaatttgtccaatggttagttggatgagattagcagttaacaatcgaccatacaatttagcgttttatttaagcgaatctatctttaataccgtattatggttgattattggattgctagtatttaatttagctgataaatatgtaaagaaaaatgggactttatctttttattgattttagttgctaataaattcattcatccctgaaaagtgattcttgcccacaaaaattccaaggaataacttctacttatgcattgttctgtggtagaaacgctgtaaagtttgtggctgcagcttgggtaaataataacgatcttcatgtttaaaaaatgaagaaaaaagttttatcatttattgccgcttttttagttgttttaggtttggctagcgttcatgcaaacacagcaactgctgctagttagggtgctaccaaacttttcaccacacttaataatacgcgtggtgtttggtaacacaaagaagctggtaaagttattagaactaaaattaccgcacatactattaacggcctcaaggtttataaggtattaaagggtaaagaggtagataagtgggataaaaagttaactgctgctgatgaaaaggctaactacaaattagttaacaaagtttctagctcacaatttgaagcttatacctttaaatcccacggtattacggtttttaacgcaaacggctggcttgctggtagcggcgacggctactactatgctcctatgaagaagaccgttaagggtaagaaagttaatgctttgcgtgtcggcggcggtgctggcaactactttatcagctacgcttacaaggataagaaattagcgtaaattgcaataataaattgaacacttaagctgcttgatagattttgtctaattctctttcaaagatttcatctggtgtgtgatatgccaatagttttcttggcaatgaattacaccaggtttcaatatcaatgatttcttgaagagaatagttattgatgtagtcacctttaggaatgaatctgcgaataaggccattgtgtctttcaacagtgcctttatcacaagaagtatacggatgagcgtaatagactaaagtgttagatactttctctaagttggatagatccgcaaactctgagccattgtcagttgtaatcgttttaaaaatttcattccagtgtttctatattgactgtgcaaggattgaaaagctgacattacactgttagccgttttatccggaatacgtatgatcaagaactctcgactcattcgttcagacaaagttagcagcacttgatcgtctctagtcttatgtcctaagactaggtcacattcccagtggccaaactcttttcggtcttaaatcactttagggcgctcttcaatgcttcgacctagtttctttttgtttttacggacacgatgaattttaatgttacgctttaatttttcgggtaaatcagagtttctgatagccaacaagccttggtctacatagttatacaacgttctagtacagactgtttattcgctgctaaattttcctatagccagacagcgattggcgcatacatcaagcgaccaattattttcaaagaagtgcttaatgacatacttaataaagtcattcttctttaagaaatctgacttgcgaccgcagcggtgacgatccaagtggtaaacttcattaccatgttttgctttatatcgcttttgcttgccattataaagcaaaactgtgccacgcttaacttcataactgatcgtagaaggagaacagccaatttcacgggcaatagctctaagagagaagccatccttgatacgagtttaaataataactcgctcttctagtgataaatgctttcccttttcgtgcttaggcatgatagaatgtaaagagtccatttgtgacctcgtttctgaatgttttgtggtaattacattttatcaaacaggtccaaatggactttttatttttctaaagtgttcaatttgattttacaatcggcgaaatagaaaatatgttaattcataagaaaattatttttcaaataaaggcactttcttttgtgatttaacttcaaaaagacctttatcagagatttttagactaggagaaacaagtaaagacaaagtagagaaagacataatttcgtttgtatttttatagcccaattctacgagatttttacgtatattaccaatttgttctcctaaaatcttcattggttgattgcttacaactccaccaattggaagaggagcattagctgcaatcttttcacctctggcgactatataaccaccttgctgattaattaattgatgttgaatgtcaatcatgccatctatatttgttcccattaccatcaaattatggtgatcgtgagcccaggttgcccctacagcaccatcaccaataatgccacgatcaactaggcctaagctaaatttaccatcatttaaaccatatctttcttggacaataattaaagctaaatttgcactttgccaatcaacgatatgattatgtacagctagccttttttgaatatgatttgtaaaagtaccgacaggatttatttgaatgacatttgctgtaactgagccattatcaacaagatttgttttaagtaataggtcttgtttagttaatttaggagctttcacactagtagttagactattaggtgaaaaatcatcttgagaagtatttttgatagtctcttttgcggatattccatttttatagacatcagctattgagagttcttctaaattatccagaatggagaaatcagcaactcttcctggtgcaattgcaccacgatcccataatcccatatgtcttgcaggaatataggtagaaatataaatggcgtcttctggcttcatccccatattgattgcttttttaactaataaatttaagtgaccttttaacaaagtatcaggcattgaatcatcagtaactaaggctacatgttcaaaatatttattatcaataatagtattgatgacatctggatgcatggattttaattgaacttcaacaaacatcccgtttcttatcttttcattgactaaatctctagtttgttgagtatgatcagtagtaacaccggcatataaaattttagctaaatcttcaccatgataagcaggggtatggccttcaattggcatagtaggtttagttttatgacaagtattaattatgtccttaattagagtgtccttgtcagaagtcatatctttaaagttcatgacttcacctaagcaaataaagcgtggatctttaagtaattcttttacttcaggcacaccaattttaccgccagttgtttccatttgaggattggttgaaggaacagaagaagggatgccgaagaaaatatcaattggcgaatcttcattaatgaaatcttttaatccattaataccggcgacattagtaacctcatgatcatcagcaataatagtagtcgtgccatattttagaattgtttcacccattattttaggtgtagtcattgagctatcaatatgcatatgggcatctacaaaaccagggattaaatatttaccttgtagatcgatgactttttttgagactgtaaaatagtttgtgtaaggatgaatgattccttaaatttatttctttaaacattagaaaaaggagttcctttctcgtatgattggtttgaacaaaaaaacacatacagaaagaagaactccttcatgaatgattttaccaaagattttgctcaagctctattcaatccagacaaaataaatgatttattgcgcaaagaactacaacaggctgttaataacttgctagaagctgaattgacggcctttctgggctatgatccctatgccagaaatggctggaatactggcaactctagaaatggtgcttatttccgcaaagttgatacgcaatttggcccaattgaagtgcaagtgcctcgggatcgcaacggtcaatttcatcagcacacgctgcctgactacaagcagcactcggatgtcttggaaagcatgattatcaagctttactccaagggcgtgaccaccagggaaatagccgatctaattgaaaagatgtatggcagccattacagtccagctcaggtatcaaatatttccaagcagatgattccaaaggttgaggcttaccacaaacgcaagctaagcgacaagtttttctgcgtctatttggatgcgacataccttcctttgcgccgagaaacatttgagcgtgaagcagtctatattgccattggcatcaagcctaatgggcacaaggaggtcattgactactgcattgcgcctagcgagaacattgaagtctggacagatatgcttcaaaacatgaaatcccgaggcttaaagcaagttgagctttttctttctgatggtgttgttggcatgaaaacagccttggccaggacttatcctaaagctcattttcaacgctgtttggttcatgtcatgcgcaatatctgcgctaaagtacgcgtcgacgatcgtgaaaagatcatgaacgaattcaaacaggtgcatcaacagacaaacaaagaagaagccacagctgtcctgcatgacttctataccaaatggggcaaggtttacagccatgttatcagaagcttgaaagacatagaaccagatctgctggtcttttataactatcccaagcagatcagagcttcaatttattcgactaacatgattgaatcatttaacaatgtgatcaagcgcaaagctaagcctaaagcagagtttccaaatgaacagtcgcttgatacttttattggcattcaagcaatgagctacaacgaacgctatttcaatcgaatccacaaaggctttggtcaggttcaggataccttagaatcctactttgattaaataaaagattaaaaaatcaatctacgagaaaaatctatttacacaaaaaatttgacagtttcctttttttgcttttaaattaggtaattctttattaatccaatagaatttgccatttttaatacttacttgaacatcttgaaattttcgtaaatatacattaaaaacatgagcatttttgataattaagtctacctcagtcatttaaaatcctccataaaagataaggagctgaatctacaattcagctccttatagggaataaacatcaattatttattcataatcttattccatcttgaaatccagttagacatatgtgaatttacaaagaagaaattaatagtttttgctcttttagcaactgagccataagttttgtttgctgcttctgcaggtgttaatttaacttgagtgtttacaggagcgttgttcaaagatttaagacctgctactttcttttgaattttttcgcttaatctaaagttgatgtatttgtatgcagctgctgaatttttactattctttaaaatagagacattatcgtagttagcatatgtaccagacttaggaacgatgtattttaagtttggattagttgcttgaagcataccaacagcataatcaccaactacagcagcttcaatttcaccagatttaaacatgttacttaaatctgaactttgggtgtaagttttgacaacattaggttttaattctttcattgccttaaatgctgcatttccgttgtctttagttacactagtaccagcatagtcaccagcaatatataacattgcggggccaaaagtagttgtcatatcaggtacagcaatcttatttttaagtttagatgaccataagtccttccaagaattaatattaactttctttggattatagataatacccaaactgtttacggtataaggaactgtattagtttctttagctagtttttgttctgattttgataaatatttgaaattggaaatcttagagaagtctaacttcttaaataacttctttttatcgccagtaacagcattgttttgagcaagttcaattacatcaacacctgtattagggttatgttcaatttgagtaagtcttgttgcactatcaccaaattgagtttttactttaactgatgattgtttagcaaaaggatttaaaacatcgttccgcatttgtttggtagataaaccaaaggttgaaacagttaaatttcctccgttagaagatgattgtgatgaacatgcagttgtaccaaatgcaactgaaccaactaataaaaaacttgcagctaataaaccaacttttttaaaattcatttttattcctttctttacaattggttatctagacaacggatgaagatgcttggagggcaaataaagctgaactttatctcctgagctacgcatcgatttcctagactcttcaacagtgaagtctccgagactagtacttaccttatatttaaagctctgacctaaatactcaagactagtgattgttccatcaatcaaattattagacggattttcttctgaattaatcaaaatattttcgggtctaatagttaataccttagcttgaatattattttcatcagttaagaaaacaagatctttacttttaatttggcgatcattaataatttgaaactgtcaaatcttttgtgtaaatagatctttctcgtaaattgattttttaattatttatttaatcaaagtaggattctaaggtgtcctgaacctgaccaaagcctttatgaattcgattgaaataacggtcattgtagctcattgcctgaatgccaataaaagcatcaagcgactgttcagttggaaactctgccttaggcttagctttgcgcttgatcacattgttaaatgattcaatcatgttagtcgaataaattgaagctctgatctgcttgggatagttataaaagaccagcagatctggttctatgtctttcaagcttctgataacatggctgtaaaccttgccccatttggtatagaagtcatgcaggacagctgtggcttcttctttgtttgtctgttgatgcacctgtttgaattcgttcatgatcttttcacgatcgtcgacgcgtactttagcgcagatattgcgcatgacatgaaccaaacagcgttgaaaatgagctttaggataagtcctggccaaggctgttttcatgccaacaacaccatcagaaagaaaaagctcaacttgctttaagcctcgggatttcatgttttgaagcatctctgtccagacttcaatgttctcgctaggcgcaatgcagtagtcaatgacctccttgtgcccattaggcttgatgccaatggcaatatagactgcttcacgctcaaatgtttctcggcgcaaaggaaggtatgtcgcatccaaatagacgcagaaaaacttgtcgcttagcttgcgtttgtggtaagcctcaacctttggaatcatctgcttggaaatatttgatacctgagctggactgtaatggctgctatacatcttttcaattagatcggctatttccctggtggtcacgcccttggagtaaagcttgataatcatgctttccaagacatctgagtgctgcttgtagtcaggcagcgtgtgctgatgaaattgaccgttgcgatcccgaggcacttgcacttcaattgggccaaattgcgtatcaactttgcggaaataagcaccatttctagagttgccagtattccagccatttctggcatagggatcatagcccagaaaggcagtcaattcagcttctaacaagttattaacagcctgttgtagctctttgcgcaataaatcatttattttgtctggattgaatagagcttgagcaaaatctttggtaaaatcattcatgaaggagttcttctttctgtatgtgtttttttgttcaaaccaatcatacgagaaaggaactcctttttctaatgtttaaagaaataaatttaaggaatcattcatccttacacaaactattttacagtctcaataatttcatcaacattgatgaaattatcataaccgatgaatctagcaacatattctgaactagggtggtgaaagatgttttcaggagtatcatattgatcaattttgccatctttcatgattaatactttatcggaaatagcgaagcattctctttgatcatgagtaacaaaaagaactgtcatttttagcttttgctgcaattctctaatttcgctacgcattttaattcttaattttgcgtctaaattactcaagggttcatccatgagtaataattgtggattgactaccaatgcacgtgctaaagaaactctttgttgttgaccaccagataattctttaggatagcgagaagctaatttagacaagccggttatttttaaaatttgatcgactcttttttgaatgtcacttttagacatctttttcatttttaatccgaaagctacattattaaagacggtcatatgtgggaataaagcgtaactttggaaaaccattccaaagtttcttttgtaaactggtacttttccaacatcttcaccatcaactaaaacttgtccgtctgttgctggaattaaacctgctatgattcttaaagtggttgttttaccgcaacctgagggtcctagaatagatactaaatcaccgttttttacggaaaacgaaatatcttttaatactttggttttaccgttatatgattttgctaaatcttttacttctaaatttgccaatttaattgctcctatcagtaagtttatttagaccaactagtttttcagttaaaagcataattaatgctgtaaaaatcattagaactacagaaatagcagaaacagttggatcatagttgttttgtaaatagttcaaaattgctggtggcagcattgtaattgatggtccattcatgaacaatgaaattggaatattattaaatgaattaataaaacacatcataaaggctgctacaatacttgctttaatgttaggtaaaacgattaagaagaatcctttctgaggtgaacatccacaaacccaagctgcttcttcaatatttttatccattagtaacatacttgctgtaactagtcttattacataaggtaggcataataaaaagtgaccaataattagactaggcataacaggtagtctaagagtaacgacagcagcttgatataaggcaaagccaattacaatttctggaattagagtagggcttaagaagaaagagtgaaaccaagacttatgaacgatgttgaatcttgttaaagcataaactgcagggataccaattattaatgccgaaagactagcaataatggcaacgaacaaacttgattcaaatccactgataaaatctggttgctgaaaaatattggcataccaggataaagtaaaacctttaattggtagagaaattgaatcctgattattaaatgaagtaataattactaaaagtagaggaaacatcaataatatcaggataataatagaaataattgctaaagttttatttttacgattaagcattaatattaggtctcctatccaaagcgcgacttgcttttctcattaatatcattgataaagcagagataataatcagaactattgcaataacacttgcatttttccagttacctaatgtcatggcttgttggtaaatcaaggtagacattactaaatttttattacctcccaaaatttgtggggtagtatatgctgtcatcgcacctgcaaagaccaaaatgcatcctgttaaaattcctgagactaattgtggtattacaatttttatcaaattaacccatggattggcgcctaatacagcagcagcttcttctgcttcaatgtttagctcagaaatactaccaactaatgaaataatcataatcgggagaaataaataagctgaaccgatgataattgccgtatcagtataaagaatgtttaatggagaattaattaaatgaatagacatcagaaatttatttagaataccgttacgacctaaaataatgatccatgcaaagtttctgacaactgcattcgttaacattggaaaaagaatgataattgttaaaattgatcttactttgctcttttgacgagcaatccaaagtgaaattggaattccaagaattaaaacaatgatcatagtgagtaaagcaattttaaatgttctaccaattacatgaagattgtacgtgttttttagaaattcagtgtataggtgcaaaaatcctttagaatcttgaaatgttggtatagcaatctgaattaatggaaagaatgcaaaaatcaagacactaataaatgccggaaatagcagccaaaaaccggattttattttcatattgttcgtattcctccttatcttgtcttagaataatttaaatgtaaaaataagtcaatacaaaatatgaattaaaataatagcatttgtgttaattgtatgcgtattgtattatttatgaatataaatagatttatttataaatttatctttttaaaaatacgaacattaccaaaaaggaagtggagttcttaatgaaaaagccagttattattagtacagatccaggaatagatgacgcagttgcattagcaatatgtcttttttcgcctgcaattgaagttaaaagtattattgcaactaatggcaatgttaatgcgcaacaagctttaataaatatattgaaattggagaaatttttcggtaaaagtattcctgtagtaaaaggggtagagcgttcattagtcaaacaatctattcgagctaaagaaatacatggtaaatcaggaatggacggatatgattttccaaatcctagttttgaattggtggatcatggcatatcaccggttgccatacataaaatagttgcagcttcttctgaaaaagtaactcttattggaattgcaccacttactgattacgctctatatgttcgtttatacccagatgatataaaaaatattaaggaactaattattatgggcggagcaatgggtagaggcaattatggtatctattctgaattcaatattgcatctgatcctgaagctgcaaaaatcatttttgaaagtggattaaaaattagagtagcgcctttagaattaggtgcacaagctaaaattatgcctgaagtaagtaatcaaatacgacagttaggaaaagctggtgatatgttttacgacttatttaagaaatttcgaggtggcagttttcaaactggccttaaaatttatgatgcacttgcagcaggcgtacttttaaatccgcaaatgtttaaatttaaaaatacacatgtagaaattgatgttcaaaccggttatacatatggtgcttcattgatggattttaaaaataagctagatcttccaaataatgctgaaatagcagtgtctgtagatccagaaattttttctaaatggtttgtagaagctttatcaaaaacaagataaaaaagtcaattaattgtcaacaattaattgacggataatggttaagcgagtatactactactagttgagaacaagaagaagcacccgcttctcgcctaagttaagtaaacctctaggctgattgataatttctgttgattaaaggcgggtatgattcttataacccgcctttttcttgtcctcaaattaacacggaggtgaacagttataccaagaagtttaatcttaaacgacagaattcgcgctcgcgaagttcgtttaattgatgaagatggtcagcaagttggtgtgatgagtaaaagtgatgccttacgtcgtgcaagcgatgcaggtcttgacttagctctgatttctccaaatgctaagccacctgtagcacgtatcatggattacgggaagtaccgctttgaacaacaaaagaagcttaaggaagcccgtaagaattccaagacagtcagtgtcaaagaaattcgtttgagtccaactattgaaggtaacgacttcgaaactaaacttaagcacgttcgtaagttcatttctaaagaaggagctaaggttcgcgtctcaattcgttttagaggtcgtgccatcactcacaaggaattaggtcaacaagtacttgaaaaaatggccgaagtaacctcagacattgctaatgtaattagtaagcctaagatggaaggtcgttcaatgttcttgatgcttgcacctaagagtgataaggacaaaaagaaaaagtagttaattggaggaaatagaaatatgccaaagatgaaaacacaccgcgcttctgctaagcgttttaagagaactgcaaatggtggtttaaagcgtcaccacgcatttactggtcaccgtttccacggtaagacaaagaagcaacgtcgtcacttgagaaaagctgctatggtttcaaagagtgatatgaagcgtatcaagcaaatggttgctcaaatgcactaatacttgttcttaattaagacagactatagtaggaggaattttaaatgccaagagttaaaggtggaacagtaacacgtcaacgtcgtaagaagatcatgaagcttgccaagggttaccgtggcgcaaagcacatgcaatttaaggctgcaagcactcaattattcgtttcatacaagtacgcattccgcgaccgtagaagacgtaagagtgaattcagaaagttatggattgctcgtattaacgcagctgcaagacaaaacgacatctcatattctaagttaatgcacggcttgaagttggctggtgttgacatgaaccgtaagatgttagctgatattgcttacaacgactcaaagacttttgcacaattagcagaaactgctaagaaagctttgaactaataacaaaagaaataagctagggaaattttcctagcttatttttttatctatttttgaattaatgctcgtaatctaattttttcatctggcgtagtaaaggccgcgtcaaccgcgttgagataaagagtggtttcttcttcaggagtcaaggcggtcttttcttcaagcagttggtattcatgcggtaaattggtattggaaacgatcatatcatcagaatttagcgtgactttcattcccatgtgcaataatttttttattgggtaagaatcaatctgatcaaaagctttggtgttcatatttgaagtggcgcaacattccaatatgatttggtgatcaatcagatattgggtaagtgctggatcttcagtgcagcgaatgccatggccgatccgtttcgcgccaatttttaatgcttgacggattgaatcaggtcccgcagcctcaccagcatggatggtataaggaaggtgtaattcttgggcacgattgaaaaaatgctggtagttaatgttagggatcgggccttccgcaccagctaggtcaaggccaacaacgccatgacctaaaaattctttcgctagctcaaccgtttccatgttttctttttcattgtgggcgaagcgcatcaaacagagaattaaaccagcgtgtaattcaggctgatctttgtctgctttttgtttttgataaaacttcgtaataccgctgactgctgcagcgattacttgtctttgcgttaaaccatttttagtatgtaattgcggtgcaaagcggatctcggcgtagactagaccttgttgttttaattcgcaaagaagatcaaacacaatcatctccagatcatgctttgtcttcattaactggttaggtaagtcaaacttttccaaaaattgttccaagctagcgcaagaattatcaactgacaattcttgccgcaatttttgatcagttaactgtggcatgtgatgttcctgcattaacttcttaacagtagcaactgggacagaaccgtcgaggtgaaggtgtaaatcgatgaattttctcatggtgatcctttctgttgattgatgattttgcttaaattgtttagtattgtaacactttttcatcagaaaaaaacaaaaatttctaaagcaaacccatttttgatatgatataaggtgataaaaaatggaggaaattaacagttaaaagatagacaagatacaaagatctgttcagaaatataaaacatagaagcaggtcaaaaactaaaaatttaatattttgttcgcttgtatttatttcactctttgctaaatttatgtttgtattggaggtgaaacaaatgatcaaggctcaagtagtcgaattaaaacctaacaagaccatgcaacaagagctggataagctttgtgattatcgcagatattgctggaatcaagctttagccacttggcaagacatgtatgaagcacgaaccttagataaggataataatcccagtccaaatgagcgcagaatacgtgatgagctagtcgataataaggcagactggcagtttgctctgtctgctagatgcttgcaattagcagtcaaagatttggctaatgcttggaagaatttctttgataaggcacagcctgattgggggaaaccacatttcaaatcaaagaaggccccgcgacaaggctttaagactgaccgggctaaagtggttaatggtaagctacgcttagacaagcccagaggcattaaaacctggttcgatattccaacatatgaagctttaaaaatgaagcaaattaaagttgctagtgtctttagagaaagaggacattattatgccgctctttcttatgaagaagaaactttggtaaagcctagaacaggtagaaagacagctgttgatgttaatgtgggacatttcaactacactgggggcaaaatcaatgttttgccatcaagattgcaaaaactatacaagcgcattaagcattatcagagaatgctggctaagaaaagacgggctaatggcaagttagctggccaaagcaataattacgtgcaagtgagaaccaaactgcaacgtgattatcgtaaagtagccaacattcaaaacgatcttttgcaaaaattcactacaaaattggttaataattatgatcaaatagtgattgaagacctagccgttaaacaaatgatgatgacgcacgtcgcttcaaaaggcatgcagagatcattattcagtaagtttagacagatattgacttataaatgtgagtggtatggcaaagaattaatcttggctgataaaacatatccatcaacccaaagatgtgctaattgtggttatgttaaaaaaggtgatgaaaaaatcactttgcaaggcaaccaaaaacatcacactaagcacaatgagtatatttgttatgaatgcggttatactaatgatcgtgatgataatgcagtgttaaatcttttagctttagcaaaataatgaaaacggggctggctaagcccttaagctgcaagagttagtcaatgcgattactcctagattggaatattggaatactaatgatgacagcagtaaataaagcgaagaaaggaaggactatatttctttctgatatgtaaaaaatatacattcttctacatatttctatgttttatatagcagtgttgatatgctttttagaccaaaatatacaattgatacgatttacaatctggacccccagaagttgaatgaaatggacattaaggcggttttttcagacctagataatacattgctcgcctggaataaatttgaaactgccaaagaaatggataattttaatcaaaagttagccaaggcgggaatcactctcgtggtcatttctaacaataatgctcaaagagtgggcaaggtacttgatccttaccatatcgaatttgtcgctaagtcacgtaagccattgccatttgcgatcaccaagaagcgcgaagcaatgcatttgcaaaaagatcaggttatgatggttggcgaccaactaatcactgacatgcaagcagggaatttggccggcgtgaagactgttctagttaagccattagttgaaactgataagtggaatacgagaatcaatcgtttctttgaaaaaattatctttttcttcctaggtttatcacatcgagtaacatttaagaaggagctatcaaatggatgaggatattatttgtatcggctgcggtgccaagctgcaatccgatgatcctgaaaaagcaggttatctgccaaaaagtgcactagataaggcaaagcaagaagaaaatgcggatgtttattgtcaacgttgcttcagattgcgccattataacgaaatcatgccagttgatttgaacaacgatgattttttagctttgcttaactctttaggacaaaagaaagctttaattgttaatgtagttgacttatttgatttttcaaattctttgctatcatcattgaagcgttttgttggaaataatgattttattttagttggtaataaatttgatctatttcctaaaaactctaagcaaagtaagattaaggattggatgagacaagaagctaaccgaatggggctttatcctaaggaaatcttcttggtttcagctaaaaagaagttgaacttggaagatttgatcgcttatattaataagcaatcgcaagacaaagatgtctattttgtagggacaactaatgttggtaagtcaactttaatcaatgccattattgacatgatgggtgatattcaagacctgatcaccgcttcacgctttcctggaactactttagacaaaattgaaattcctctagaaaatggtcactttttgattgatacgcccgggatcatgaccgagaatcaattggctacgcacttaaatgctaaggatttggagctggtctcacctaagaagcctttaaagccagctacttaccaattattgcctggtaatactttattcttagctggtttgggacggattgattatctcaagggcgaatcgactagctttactgtttacgttgctcgtggaatgtatattcaccgtactaagacagctaatgcggatgacttttataaaaagcataaaggtgaattgttatccccaccagctgcagatgatgaaatggcaccactaaagggtcaagaatttagaacggaatataagagtgaccttttatttggtggaattggttttgtgactgtacccaagggatgcgttgttaagacttacacaccagatgggattggtttaggtattcgtcgtgcattgatttagaggtttgcatatggttaatccaaaatgtattgaaaaaatgccaactgctaaaattgaagcagaattggaacaagaacaaggtaaaggtcgtcagattgggattatgggtggtacctttaatccggtgcatattgcgcacttggtagcggcagagcaagcaatgactaagttgaagctggatgaggtctggtttattccggataatattccaccgcataaaaatgcgccgctgacttctgctaaagatcgggcaacgatgcttgatttagctacgcgcgataatcctaactttagggtaaaactattggaattgttccgaggcggcgtttcttatactgtggatactatgcgttatctcaaggaaaaagcacctcagaatgactattatttgattatgggcagtgatcaggttaacagtttccatacttggaaggaagctccgaccctggctaagctagtaacattggtcggaattcgtcgtccaggttatccacaagatccgcaatatcccatgatttgggttgacgcaccagatattcgcctaagttcgactgctattcgtcgcagtgtcgcaactggcacttcaattcgttacttggtaccagaagccgtcagagaatatattgaagaaaaggggctttaccttgacgaaactaatttttaaaaatacttattcaccattctctagtgaacaaattgttgctaaagaaaaagcaaacatgaagaaaaaacgttttgaacattgtgttcgtgttagtgaaactgcacgtaagttggctaagttaaatggatatgatgaagaaaaagcagccttagctggctttgttcatgattatgccaagcaggtaccggtagaagagtatcgtaaggtaattaaggaacaggattttgatccagatttgcttaattggaatcgggccatctggcatggcattgtggggactttctttattgaacgtgatttaaaaattagggatcctgaaattttaactgccgtacgtcgtcatacgactggtgatactaagatgactacattagataaaattatctttgtagctgattttattgaacccggacgagattttccaggagttgaagaagcgcgcaaagttgcttatgctagtcttgatgaaggggtaggctatgaattgcagcacaccttagagtttttaattgaaaataaaaataaagtatatcctcgtactttagaagcatacaatgtatggggaattaagtaataaaaaggagaaaaatattgactagtcaagaaattttagattttactacccaagcaattagtgaccgtcatggtgaagatactgaagcttacgatatgcgtggaatcagtattttagctgattactatgttattaccagtgcaggctctaatcgtcaattacatgcgatcgttaactcaattgttgatgcggctcacgaaaacaactacactgactaccgtattgaaggtaccagagattctaactggcttttgctcgatttaggtgatgttgtagtcaacgtctttactaaggaagcacgtgaattttataacttggaaaagctatgggctaacggtaagcaagttgaattgaaggaagattaagcaatgagtgttgttgggattattgcggaatttaatcctttccatagtggacatgagttcttgctaaatcaagcacgcttggttgctggtaatgatccaattgtggtgctcatgtctggtaactacgtgcaacgtggtgagatggcgattatgagcaagtgggagcgggctaaggtggctttgcaatctggtgccgatttggtatttgaaacaccattttcaacggcagtagaaccagctgatctttttgctctcggaaacattgaacaacttgctaaattaggcgtaactgatttagtctttggtgtagaagatgctaacctgaattttgcttatttgggtaaaagaattgcggaaattccccagaatcacatggattttagagattatagccaaacttattcaacacaatacaaccaaatggtagcgcatgaagtaggctatgaagttaatcagccaaatgctattttggggttagcgtattcagtagctaatcataatttaggttcaccattaaacctgcatccggtcaaccgaattggagcaggacatgatgaccttttacaaagagaaaaagttgtccaaagtgctagtgcgattcgaaacttattattgcatggtgaagatacaaaaaatttaaagtattggatgcctaaagcagaagcaatggtgttagctgagcagaaaatttatcctaattggaatttgctatacccatttttgaagtatcgaattgaatcatcttcagttgaagaattgcgtcatatttatcaaatgagcgaagggcttgaatataagatgaaacaagagattcatttagcccgcgattttacagaatttttgcggcatatcaagtccaagcgttatacttattcccgtttgcgccgtttgagcttatatactttgcttaatgtcactcaggatgatatattggctagctttaatcatgagtctttgatgctcttaggctttagtaaggtaggtcgcaaatatttaaagcaacagcgcaaggaatttcagacagaaatcgtctctaaagttgataaaagaagtgctaagaacggctctttagctttacaagttagggtagaccgtttatttgaacaaataatgggcgttgatcaaaactttggtcgacggccaatcgaggtgtaaaaatgttagaacttagtttttctaggattcaaaattccaaggaaccattaactcacattgaacgtgatttggaaatgcgtccagaattttttaagcgtagtaaagatctactaattgatgcgaaaaatgtaaaagtgagcggtgacttgttctatcaagaaccatttgtgactggcagttttcatgtggccgctgatctggttgtgccatcaagcagaagccttaagccggtaaactatcatgaagattttacttttactgaaaactaccttgatcgtaagccaaccaaggaagaattggaagaaaacgatactattgtacaagttgagaatgatcaaattgacttgcaaacagcggtagaagataatattttactccatattccaactactattttgactcctgaagaaaaagaaaagaatattttcccagagggtcaaggttgggaagttgtttctgaaacctcttttgaagaaggcaagaagaaccaagttaacccagcttttgctaaattgaaggtcttgcttgatgggcaagataatgataaggacaataaaaataagtaataaatgtaattgaaaaatatggtggacaatcaaagaaaatttttactttgattgttttttaatcttgtgttagaagcacttttaaagtatcctttaattataaaagcattttttaattaatttattagtattagaaaaccaaattgatctacgaggaaatgaattaacatggcaaaaattctaattattgaagatgaaaagaacttatctcgctttgtcgagcttgaattgcaacatgaaaattacgagactgttgttgagaataatggtcgtaagggattagaagatgcattgagtcaagactttgatgctatcttgcttgacttgatgttacctgatttaaatgggttggaaattgcacgtcgtgttcgtcaagttaagactacgccaattatcatgatgactgcacgtgattcagtgatcgaccgtgtttctggtttggatcatggcgctgacgattatattgttaagccttttgcaattgaagaacttttagctcgtcttcgcgcagtgttacgtcgcgttaaaatcgaaaaggacgcatcaaaggttactgttgctaagcaaaagattgtaaaatttaaagatttgacaattgaaactgctaaccgaattgtgcaccgtggtgatggcaaggcaatcgatttaactaaacgcgaatacaacttattaatgaccttgattgaaaataagaacaacgtagttagtcgtgatcaattattaaacaagatctggggtccagaatctaatatcgaaactaacgtagttgaagtttatgtacgttatttacgtaataagattgacgctccaggtcaaccatcttacattaagacggttcgtggtaccggttatatggtaagagatgaagatgatgatcaagaataaagacgaggaaaaagaggccaagcactcatccctaattgtgcgatgggttagtatcgttgcattaacgattacggtctcttttgtcatattttcagttgttgcctatcaaattgttagtcatcaatcgatggaacagcaacaagagacatctaataatgtagttaccacgatggaccggacattaagttctattcaagatgagctagagatctcaaatgtaattcctgctctgtcaccgtctaccaggcgtattttgaggggcggtcctgctattagcaaaaaagatacagagaataaagcatttagtgatagcctgatttcatcgatttcgaatccagatattaatgtagcagtttacaacaaacatgatgaaattgtttttactaatggtaattctgcacctaagctaaaagaatttgccggcaaccaacttgaagaagtagtaaaccgaaaaaaaggcaaaatgcttttaacctaccagaaaatctattctgaggtaaatggcaaattaactggctatgtagtggtttctaatagtatgacttattacaatagcttgatgagtaatttgcttcattggatggtaattatttcactgattgcaataattatcttcattgcaatttcttatattttggttgttaatgtagttcggccaattaagacgatgtctaaggtggctaaggaagttaatgctgatcctaatagtgaggctagaattaaggaactacatcgagatgatgagttagaagaattagctacttcgattaatcaaatgctagaccggatgcaaggttacattgagcaacaaaagcaatttgttggtgatgtctcacatgaattaaggacaccagtggcagtaattgaagggcatttgaacctgcttgaaagatggggcaaggatgatccgcagattttggatgaatcaattaaggcttcgttgcaagaagctgatcggatgaaacatttaattcaggaaatgcttgatttaactcgagccgagcaaatcgatgttcaatatccgtatgaagtaagtgatgttaatgaaatcatccgcagagtggtcgctgatatggcaatggttcatcctgacttcaagattcagctggatgaggatgatttacctgatgatacagagattcaaatgtatcacggtcatttggaacagttgctagtaattttgatcgataatgggattaaatattcgactgatcgcaagcagattaatgtttcagctggtgtaactaagaagaatgttaatattattgtgcaagactttggtgaggggatttctgaagaagatcaaaagaaaatcttcaatcgcttctatcgtgtggataaggctagaacccgtgaaaaaggtggcaatggtttaggtctatcgattgcacaaaaattagttgctagttataacggaacaattagtgttgaatctgttgagggtcagggcagccagtttaaattgaagttccctcggttgactaagaaaaaagccgctaagttaagaaaattaaatgagaagaaacaaatgcctaagagcaatcttgaggcataaacaaaatcctattaaatcaaggtttgggtaccaagatttaataggactttttttctctagaggcttaggtattagaaaataagaaataaaatgcttcgaaaataattataatttttattaatttaagcgatataattagctaaaaatatttaaagttaagggatgtgacataatgaaagaacgcattttttcaaggaaattttggcagaaagtttttaactatcaattgattatctggtttctcttgatgattagttatactttttctcagcggaacaatcatttttattttataggggatttgttcaatctagcttttagtacggcgatcatgggattgaacttttacgtgcaatttaaaaaggattccagcaagactaatactcaaattgttcgctggctgaccatagtaatttttgctaaatttggcatatcactgggaatttcttgctaaaaaacctgccggctatcgagattctattagtattactgctatgggcggtttatattttcttgctagttccaattgcagttgtacatgttggaccgattaaaaattggtttttacgcttgctaactatttactttcttgatattcagtacggtgatgcacaaaatttagcaataaatccagatttttgctggcttcattcacttacttatcaaggtgtaatcgcagctattgctttattaacgatgacttgtttcttagttaaagcttggggctatcacttcaatccaaacttaaaatttattaaaagttcaagctttcagaagaagatcttgctggctttattgatcatggcaaccattgatttgttttacaatattcctaatttaactgcagccattgagctcggaattttggaagaaaccgaacgctatttattgatcgtaatttttttagctggttttaatagattcccaaagtatcgcatccctgttgcaatctatggttcagcaattttgttcggccttagtcatttaagtaattttggctggcatggagaaagttttactgcaacaattgcacaagttattggcgtaatggggagcgcctttatctgggtagaattgtatctctatacaggaaaactatggttgccgatgatctatcactttttaatggattatatttctgatttgcaatctggttggaattctgctggctggtcttggaatggcgaaatcactgattatatttatactgtattaattgttggcgttccattgctattctcaatttggatgcttttcggtaaaagaaggcaagtaatggaagataatgcagatttgattttggatctaaacggtaggcaaagcatgatttagcagtgacttatattaaagggactataatgtatatgcaagggtaaaataattaagagaggtcataaattatgaaacttaagagaattgtattaagtattgtggctggaactgcgcttttggttcctgcagctttagcgggtcaaaatcaattaacaccggtagttcgggcaagtactctgaagaataagattacaactgttaagagctataccaatccaactttgtataataagaatggtaaagagctaggtagccaagatcggataaattttaagaaaccgatcagtttttatgggcaacctattgttattcagggacccagggtcaatgcttttattaatcttaatgggatgccacaagctattgttaatggtgaaacctatgcagatttaggtgatggtggttatgtcaacatgaaatcggttggtagctataactggaataataatgagatcggaattattaaaaacacctatatttacaatagcaagggtaatcgtttatcaacttatcgcggtggcaaggcttatttaactaaaggtagcaagattaaatatgctggtaaaagttggactacttatcctgattcatattttaatttaggtgatgggacgtatttaaagtctaataacgttaataccatgaatggcaaaggcgttttgaagctgaatgctaacactgctatttataataagaatggcaagcgtattagctttaatggacaacaggtttttcctaaatactcaattataaattatgctggtaagcgtcgcactaagacacaaactgacgattactattacacaaacttaagtgggagtaaatcatatgcaattaagaattataagattaaaggtcaagactattattacattggcagaggtgcttatatcaaggcaatgaatgttggtcgcatcaatggcaatccggtatttcgtgatggcggtgcaactacgattgttccgcagacagatttgtacatctataattctaaattaaagaaaaccaaacaatctgttaagaaaggacaaaagattagagctttagatccagttgttcttggtagtggtgatattgcccaactattttacagaattaagggaacatctaactatgtttcctggggtgattatagtgagtatggttttgaagatgatgagcacgtgggctacttcaactttcgtgttagattaaatcctgttaaaactattgaaaatgccgctacacgggccgctgaagaatcagattaattgggagtgaagacgttatccatttggatagcgtttttattggattatgaaaaagaattaatctgaagtgtctaggaaaactctaaaaattgaaaactcctactaaatcttggcataataagccttgatatagtaggagttttgttttgagttaaagccaaaaatcgattaaaaatagctttttctcagatacaaacttaattttttctatagagatctttcttcaaacaaatgaccataggaacttaaaattctagctaaatccgtccaagtaagactgatagttttggtattatcattgggatggacgccaacataattattttcctccatggccgcttggtctacaatcaagggaatagtgttgctagaatcattgagtaagttaaagggtgaaaccgtaccagatttaaccttgagtttttcctcaagttcatcttctgaagcaaaagttagactaggagaaagtaattcactttgtgcttttttccagtcaacttttttattctcaggcaacatgagtaaataataattttttccgttacgcgatttaataaaaagagtcttacatttagtaaaatcttcatttttcaagtatttatctgcttctttagttgtataaactgctggatgagaaaaaacttggtaactaatatcgtgatcatctaaaagttgtaatatttcttgagtatgcatattttcctcctaataaaaaagtcaggattttactcctgactgataactatttacgcttttgcttacctttattacggttacgtaagtcttggtgtagttctttcttagcttcagttgtagccttgctttgaccgctattggagttaaacaaagcatccactttttctttagtaacaacagtttcaattggcttatcttttaattcatcggcaatatgcttcttaacactaggtgtaaggacaaaggtaacgattacttgttggacaatcattactaagttaccagcagcccagtaaagagctaaggcaccagagaaggataaactgaagaacaaagtcataattgggttaacaatcatcattgattgcatggtcttcttttgttcttctggaataccaattagtgagatataaccttgaataacggtaaagacagtcgcaataatggctaaaacaacagatttggaacttagagaaataccaaagaatttggattgtgccaattgaggtgaatagaataccgcttgataaattccccacataattggtaactgaataattaatggcaagcagcccattccaccagttaatgaaacttggtttttagagtaaagctctctttgccaagttgataaagtcatttgttggtcaggggtgatccccttgtgtctcattgcattttgaatcaacttcatttgcggttgcagacgagccattttttcctgttgacgtacactcttgttttgctgtactaacatcaatggcatcaagattacacgtacaactaccgtaataatcacgattccccaaccagcaccattatcgccgccaatcatttgcgcggtttgaatcatgatattttgtaaaggtcggcctaaccattggtaaacccaaccgtaaataccgctgtgcggtgcaacatgtggatcagttgttgccccacaggcacttaatacaagagtagctactgctaataaagccagtactccagcgtatcttttaatttttttcatttaaataaatcaccacttaatttctatctaaaaatgtatgtctctaatataatacatgaaaatcatgcattttttctacacctggaaccgattcttgactaatattttgaatttgggcaaatccagatgcagtaggtagtttttcaataaagcggtcgattttatcactgtctgcttgtaaatagattgtaacggtaccatctgcattatttttaacagtgccaggaatacccatcttgttagctaatgccatggttgaccaacgaaagccaacgccttgaactaagcctgaacaaattaattttcttgtttccatttttatctcccttatttaaattaagttcaactttgattttagcatgatcaaaatagattatcagttataatagattttgaatacaaaaaggagaaaaatatgcaacaaattagttcagttaataatgcaacgattaagaaattagcgaagttaaagcaaaagaaataccgcgatgatgaaggcttatatttaattgaaggctttcacttatttgaagaagcacttaaagctggtaaaaaatatcagtatatcttaggtactgaagaagcacttgatcaagcagatagtgaatatgaagttaatttaagtgggaagaatgtcgtattaattaacaaagcgattgctcgccacttaagttcgactaagaattctcaagaaatttttatggtattaaaaattgatcaaccaaaagaatttccgtttaattatggcaagtgggtgctgcttgataacttggctgatcctggtaatgtggggacgattatcagaactgctgatgctgctggttttgatggggtagttctttcaccagagagcgctgacctgtataatcctaaaacgcaacgtgccatgcaaggaagtcaattccatatcgatttgattaagcgtgatctagctgatgtgatcaccgattttcaggatgcagctattccggtttatgcatcgctgcttgatcgttctgctaagcaattgcctgatttcgaaaaagtgccacaacttgccttaattattgggaacgaggcgcatggcataagcaaaacaattgcttctttagctgatgaaaagctttatattccaattaaaggacaagctgaatcgcttaatgccgctgttgcagcagggatcatgatctatcactttgcttagcacttgtaattagtaagtagatctactataataattttagtaatactaaaaagtattttatataatagtatttttactggaattatataatacggagggacttacctatgcaagaagttaaagagaaaaaggacgcagctccttgtaaaccagaagattatgaattatgtggtcattttgttagtgcgtttaagattattggcaaaaaatggaatggcttaatcatcagttctttgtgtgatacacaagatatgcgctttaaggacttggcacgaactgtcgaggcttgcagcgaccgtgtcttagttgaacgtttgaaggaacttgaaaaggacgatattgttaaaagaagcgtcgatcaaagtaccggtattatttcatatggtttgactgaaaaaggtgcggaacttaagcctgtttttgatcaagtacataattgggcagataaatgggcttaagctattgacattaagtaagcatagaagtatattacttattgtaagttgcttatttaaaataagattaggtgaaaggagtacgaaaatgaaatctttaagtatgatgaatgttaatactgactgttgttcttgtgtatctaacattatttttaatactcaagaactcagttttcgtatttccgaatagctttaatccagagatcaaaaagatttacgttagctgaaaagacgtagatcttttttatattgtttaaagagacctatgggagtaggtctttttttgtatgattgggggatttttaatgaattggacagttatccagcaagctctaccaatatttgcgcgcggctttgaactgaccttatggctttcattgattggcattgttggctcaattatcgtgggcattattgtcagcttagtacaatattttaaactaccagtactaagtcaaatttcaacggcatatgtcgagctagctagaaatacgaaactgtcaaatcttttgtgtaaatagatctttctcgtaaattgattttttaattatttatttaatcaaagtaggattctaaggtgtcctgaacctgaccaaagcctttatgaattcgattgaaataacggtcattgtagctcattgcctgaatgccaataaaagcatcaagcgactgttcagttggaaactctgccttaggcttagctttgcgcttgatcacattgttaaatgattcaatcatgttagtcgaataaattgaagctctgatctgcttgggatagttataaaagaccagcagatctggttctatgtctttcaagcttctgataacatggctgtaaaccttgccccatttggtatagaagtcatgcaggacagctgtggcttcttctttgtttgtctgttgatgcacctgtttgaattcgttcatgatcttttcacgatcgtcgacgcgtactttagcgcagatattgcgcatgacatgaaccaaacagcgttgaaaatgagctttaggataagtcctggccaaggctgttttcatgccaacaacaccatcagaaagaaaaagctcaacttgctttaagcctcgggatttcatgttttgaagcatatctgtccagacttcaatgttctcgctaggtgcaatgcagtagtcaatgacctccttgtgcccattaggcttgatgccaatggcaatatagactgcttcacgctcaaatgtttctcggcgcaaaggaaggtatgtcgcatccaaatagacgcagaaaaacttgtcgcttagcttgcgtttgtggtaagcctcaacctttggaatcatctgcttggaaatatttgatacctgagctggactgtaatggctgccatacatcttttcaattagatcggctatttccctggtggtcacgcccttggagtaaagcttgataatcatgctttccaagatatccgagtgctgcttgtagtcaggcagcgtgtgctgatgaaattgaccgttgcgatcccgaggcacttgcacttcaattgggccaaattgcgtatcaactttgcggaaataagcaccatttctagagttgccagtattccagccatttctggcatagggatcatagcccagaaaggcagtcaattcagcttctaacaagttattaacagcctgttgtagctctttgcgcaataaatcatttattttgtctggattgaatagagcttgagcaaaatctttggtaaaatcattcatgaaggagttcttctttctgtatgtgtttttttgttcaaaccaatcatacgagaaaggaactcctttttctaatgtttaaagaaataaatttaaggaatcattcatccttacacaaactattttacagtctcagaaatacaccgcttttgattcaacttttctttttgtattatgcttttccagtaattggcttaaaaatgtcggcagaagtctgcggcattatcggtttgattttcttaggcggcgcatatatggctgaaggctttactggtggctttaatggtgtgaatcctagtcaaattagtagcggtaaggccttgggaatgaataattttcaactagctcgttatgtggtttttccacaaggattcagcttaagtatgccagcattaacggctaatattattttcttaattaaggaaacctcaatcttttcagtaattgcaataccagaattgactaacactgctcttgacttaattggaatgtactatcggtcaaatgaatacttactgatgttagtagttgcatatgcaattattttgattccggtgattttattattaacttggcttgaaaggagagtacggtatgcttcattcggggattaatgttttatttgaagggagtaactttgctcgcttgatggcaggactatggacttcaatttggattgcggctttgtcattaattatcggcttagctgtgggtacaatttttggtatcttaagaacgctcaaaaatcgaccgattcgctttgttttgcgcctatacctggaattctttaggatcgtgccaactgtagttttactttacttagtttattacatcttgcctagaagtttgcacgttaactggccagcaacttggatggcagtcttagccttttcaatgtgggtagccgctgaatttagcgatatcgttcgtggagcactagaatcagttcctaagacgcagcgtgaatccggcttagcgttggggctaaatcgcttgcagctatttcgctatgtattattgcctcaagcggtcaaattagaattgccagcaacgatcaatttggctactagagtaattaagaccacttctttgttaatgattatcaacattatggaagtgatcaatgttggtcaacaaattatcgaagctaataaccaacaatatccagcaggcgttttctgggtatatggttttatctttatcttgtactttattttagattatccattatctgcatgggcaaagcgtttaaccgctaaaaattaggtgaatgaaatgacagaagaagttttaagagtagaacatttaaataaattttatggtaaacatcagaccttgtttgatattaattttagtttgaacaaaggtgaagtattgacgttattaggaccatctggttcaggtaagagtaccttgcttagaaccttaaatggcctagaagaatatgaagacggcgcgatttatttccatggcaaaaagattaatcctagtccaaaggaatggcaattattgcggcagaagattggcatggtttttcagagttatgatctgttcccaaatttgaccgtaatggaaaatattttgctggcaccggtgaaagtgcaaaagcgtgatgaagacgaggttaaagaagaagcagtcaaattactaaaacaagttggcttgtcggaatatggggatgcgtatccgcgtgaattatctggtgggcaaaagcaaagagtagcgattgtacgagctttagttatgcatcccgaagtaatgctttttgatgaaattaccgcttcacttgaccctgaaatggtgcgtggcgtgttagatattatgcaaagattatctgatgatgagcatatgacgatgatcattgtaacgcacgagatgaactttgctgctagaattgcagataaagtattgtttttagaggatggaaaaatcttagaggatacaccaggcaaggaattctttgccaaaccgaaaacgaagcgagcacaagaattcttagaaagtatggatttttaggtgtgaacaatggcaaaaaagatttttaactggattatggctatcctattcgtagtagtagtcttggttgcaggctatattggcattagccggccaggcatcaatggcactgcttcagaggatagatggaatagtgaaaataatgtttcttcaattaaaaggcgtggttatttaagaattgccgtttttggtgatttgccgccatatggctgggttaattcacaaggtaagcgtgttggttatgacgtgcgtctagcgcgcagagtagctaaggatttgggtgttaaacccaagtttattcaggtaaatgccaataaccgaattgataccttgaattcaaataaggcggatattgttctagctaacttcaccttaacgcctgaacgtaaaagtgtggctagttggaccaaaccatacatgaaggtatcagtcggggtaatttcaccaaagtcagctcctgtaactaatgctaagcagctaaagggcaagagtgtaattgtgactaaaggtacgacagcggaaaattactttactaagcaaaaaggcgttaacttgctgaagtttgattccaagacccagcagtttaacgcaattaaaaacggccgtggcgcagctttagccgatgataattcttatttgtatgcttgggttaagcgtaatcctaagtttactgttggaattaaaactattggccctaaccaatacatctctggtgcggtgaagaagggcaacaagtcactgcaaaaatggatggatcgtgaaattactaagctgaaccgtgagagcttctttacttatgattataataaagaattgaagccatactttggtaaggaaatcagacctagtgacattgttttgccgcagggaaaataaaaaacttgcaagaaacaagtaaaagaaatatgataatagttaattactaagatcaagactagtaacagattatttttctaaagagagtcttctttcaaaagctgcaagagaagatagaaaaagtctgtgaatttcatcttgggagtaggatctaatcaattccggtatttcaccgttaacgaaaacttaagtgtgggcgttgctacgtccaaactagggtggtaccgcgacgcttcgtccctattggagacggggctttttttgttttgaaaggaaagatttaatggacttatttgataagttaaaagagctccatgaagaagggcttaagcaaatcaacaaggctaaagacgaaaaaactttgaatgatgtcagagttgaacttgttggtcgtaagggcgaattaactaagattttgcactcaatgcgtgaagttgcgccagaaaatagacgtgaagttggtcaaaaggttaacgaattacgtgacttgtttaatgctcaattagatgaagctaaagaaaacattgttcatgcaatgttagttaagaagcttgaagatgaaaagattgatgttactttaccaggtcgtgaagcacatcttggttcaaagcacccaatcaacattattttagatgatcttgaaagctactttattggtatgggctatcaagtagttcaaggtccagaaattgaaactgatcactactgctttgaaatgatgaatatccctaaggatcacccagctcgtgacatgcaagctactttctacattgatgatgaagatttgcttagaagtcagacctcaggtgatcaagctagagtcctagaaaagcacgacttctcaaagggtccacttaagatggtgggaccaggtaaggtataccgccgtgatgacgatgatgcgactcactcacaccaattcatgcaaatggaaggcttggttattgacaagaacgtaactatgagtgatttaaagggtactttggaattaattgccaagcacgtttttggccaagatcgcgaaacccgtcttcgtccaagttacttcccattcactgaaccatcagttgaaatggatgtatcttgctttaactgtaatggtaaaggctgccctatttgtaaatacactggctggattgaagtattaggtgctggtatggttcaccctaatgttttggaaaatgcaggtgttgactcaagcgtttacggcggttttgccttcggtgttggtcttgatcgtttcgctattttgaaatacggtatcgatgatattcgtgacttctacaccaatgacgtacgtttcttagaacaattccgtaaggaggaaagataattaatgttagtttcatacaattggctaaaagattttcttgatttagatggtcaagatccatacgaattagcagaagaaattactcgtagcggggttgaaattccagaccgtgttcatccaatggatggcttgaagaagttagttgtcggccgtgtccttgattgtgaaggcgttgaaggtactcacttgcacttgactcacgttgatgttggtgaagacgaacctttgcaaattgtctgtggtgcacctaatgtagctgcaggtgaagatgtgattgttgctcttcatggcgctcgtattgctggcaatgaaaagatcaagaagggtaaaatccgtggcatggaaagttacggcatgatctgtggtttacaagaaatcggctttagcgatagcgtggtaccacaagaatttgtcgatggtatttacgtattcccagcagatgccgaagttaaacctggtcaagatgtatatgaagcacttggcatggatgattacattttgaacttcgacattactcctaaccgtgctgatactttaggcatggaaggtgccgcttatgaagtcggtgctattatcgaccaaaagccaaaggttgaagaaaaggttgtcttaaaagaagatggtccagcctggacagattcactcgatgttaaagttgatgaaaagcttgcacctaagttttacttacgtaagctcgagaatgttaagattcaagactcaccactttggttgcaacgtcgtctttggaatgcaggcattcgtccaattaacaatgtagttgacgttactaactatatcatgctgttaactggtcaaccaatgcatgcttatgacgctaagacttttgctaacggaaagtttgaagtaagacttgctaataagggtgagaagcttactttgcttaatgaaaaagaagttgaccttgaccctaaagatatcatcattaccgatggtaaaaagccagtaatgatggctggcgtcatgggtggacttgattcagaaatcacatcagaaactaccgatgtcattcttgaatcagccatctttgatccaactttagtcagaaaggcagcacttcgtcacgctaaccggaccgaagcttcaagtcgctatgaaaaaggcgttaactgggatgccactgaaaaggcaattaacatggctgcgcttttacttagaaatgacgctgacgctactgttgatgaaggtattcttaaggcaactgaccaaaagcgtgaaccagttgtggttaaaactactgcttcatacctcaataaagtattgggcactaagttatcagttgatgaaattgtaaagatttttgaccgtctttgctttaaggtagatgttgatggtgataatttagctgtccatgtaccaaatagaagatgggatatttcaatcccagccgacttagttgaagaagtaggccggctttatggctatgacaaccttgaatctactcaacctgttttgccagaaactcatggtggctactcagaaaaagaagaaatgatgcgccgcatgaaggcaattgttgaaggacaaggcttgatggaagctatttcttactcattgacttcacctgaaaaggccgttcgttacactaaggatccaaaagaattagttgaagttaaatcaccacttaactcaagccgttctgcaatgcgtgagaatttgatgactggattggtagatgctgctagttacaactttgctagaaagcaaacacaattagctttatttgaacaaggcagaacttatgaccatgatggtggtaaattcaacgagcatgaacatttagcagctatttactctggcaatacttttgcggaaaattggcaacatttaacccaaaaggtagacttctactttgttaagggacagttaaccaatttgttcaatgcaattggtattgatcctgaaaaagtggtttatgaggctaaaggcatcaaggggatgcacccaactagaactgcaggaatctacattgataagcaatatgttgggatgatcggaatgattgctcacgctgtaacgattgctgataaggcacttcgtggtagcgagctttatggctacgaaattgatctcgatacaattattccaatgttaactaagggcgtaactgcagtgcctgcacctaagttcccagcaattcaacgtgacctttcacttttagttgataagccagttactaaccaagaaattgaaaacgtcattaaatctaatgctggtaagtacttaactgaacttaaggtaatcgatgtttatgctggtgctcacattgatgttggtaagaagagtattgcttacaacttaaccttcttgaacagaaaagatactttaaccgacgatgttgtcaataacgcgatggataagattgttgctgctcttgaaaatgatcttgcgattaaagttcgttaaaggttgacattattgacgtaaattaatattattgatcagtgcaagataaagaaaattaatttctgaggagttaaaaatatgcctgaaaaatcttatccaatgactgctgaaggtaaagaaaaacttcaagcagaattaaagaacttaaaattagttaagcgtccagaagttattgaacgtatcaaggttgcacgttctttcggtgacttgtcagaaaactccgaatacgatgcagctaaggatgaacaaagtcaccttgaggatagaattgctcaagttgaagaaatgcttaagtatgcacaagttgttgatgcagaaagcgttgatcctaacgaagtttcagttggtaaaacagttacctatactgaagttggtactgatgatccagaaacttacactattgtaggtagtgatgaatcagatccattgaatggcaagatttctaacgattcaccaattgctcaagctttattgggcaaaaagaagggtgaaaccgtatcaattaccactcctggtggcaagtttgacgttgtaattaacgaagttaaagcctaataataaaaagggagggtagctatgactatcttcctttttgtttttttgaaaggattttaaaatgagaacagttggtattattggcatgggccatgttggtgcaaccgttgcctatactttatttacgcacagtatggttgacgaactgattttaattgataaaaatgaagctaaagtaaatgctgaatacaatgacttgcatgatactttggctagaaatgatagctatgttaatgtgcgaaagcaagattgggacggcttagaagatgctgacattattattaccgcttttggtgatattgcggcttcagttaagacaggcgaccgctttggtgagtttgaattaaatgcaagaaatgccaaagaagttggtgcagatattaaagaatcaggctttcacggcgttttgatcaatatttctaatccatgtgatgcaattacccaaattttgcaagaaacttctggtttaaagaagaatcgcgtctttggtactggtactttccttgatactgcaagagttcaaagaataattggtgaaaaacttggtcaagatccacgtaacgtagaaggtttcgttttaggtgaacatggttcttcacaatttacagcctggtcaacggtaagagttaataacaagattgctttccaattgtttggtgatgaagaacaagaaaagattagtgaacaatcaaataagaattcctttattgtggctaagggaaagggctatactagctatgctattgccacttgtgctactcgtttagttcaagcagtctttagcgatgctcatctatattgtcctgtttcagtttataatcctgaatacaagacttatattggttatccagctattattggtcgcgacggcattgaggaagaaattgaattaaagcttacttctgaagaaaaagaaaagttgcaagctgctgcagataagatcaaagaacacttgaagcaattgaagaaataaaaaatagtcattataaaaaaataaggcgagaattacagtcattgtagttctcgtcttatttattgcttattttagttttacatcccaagcggcaatttgcttgttgccgtagtatttcttgtaaatttgcttggtctttttggtctggtatgctttaacaatttcttgataaatctttttatttttatccttggtgcgggcgcaaataatattgatccattgctcagagtctttgttcaatggttcgacaaagatagtttgcttgtcacctagatgtgcagggccagcaaagtcattgttgacgacagcggcatcaacatcatcgatcacgcggctagtttgttcagatgcaacttctttaattttgaagtggttaggattggcagtaatatctgcaacagagaccaatactttgcctttcttcaatttgatcaacccggcatttttcaaaacaaaaagtgctcttgattcattggtgggatcgctggggaccacaattgttgctccttcaggtagtgcatttaggctatgatattttttggaatataagcgaataggtgagatataggttttaccgattgcagtaattccgccatggttggctttgttccaggcgttgaggaaagcatagtgctggaaggcattcagatcaacgtcaccggatttaagtgccttgtcaggttggtcataaccatcaaaacttttagtggttaaaataatcccatatttctgtttgacggtttgagcaacgcttttccagattgcaatgtcacctttgctggcaccaacgattcctacgctaactttggtttgaccgttgctttttggcgtccaaaagaagctgaagtaaccagctacgataatcaataagctaacaatggtgccaataataatattccgctgtcttctttttctcatttttctttctctcatatgcaaaaaaagcacccatcctcaaaggacgagtgcttcgtgttaccacctttatttgccagctatttacataactgacctcaatagctatctaacaatagcttgcattgttaacgagagcaaccccgatactagctaaatatcactagtataatcattctgaatccatcttcattaagtagtttcttttacttctcaccaaccagtaattctctgtaagaaagctagctataattactctattcatcaagattttttaattattgctattaatttatcatctcgttttaattttgtcaaataaatttttttacttagttaaaaagttagtaacggaagaaatagtgagaaaaagtttatttttgtcgattaacaaagtagtaaatgagtgagataaccgattcagccaacatcccaccggccatccagtacattgccatcatcattttgccggtaaaagtaaagtaggcagtaatggcgtaaacaattacccaaataattttccaaaataagttattcattcctgagcacattttgaagctcctttatttttgactagtaccagaactgctgtcaacttccatgccgcaaccttcggtatccattcctggcatccacacatcttcaggtttaatgcctctttctttagcaaaggcgtcggttaatgtcttcatatccattaacttgtatgtctttgggtgtttagggtcgaatacttcgatttgagccatcattccggcatcttcgtgttcaataatgtggcagtggtacatgaagactccagtttgtgggaattctacacgcaagcggacggtttcacctggtctgacaggaatggtgtctttgtaaccatattcatttggaaatggcttttcgccatcacgtgaaacgactgtaaagtgtgtgccgtgaatatggaatgggtgcaacataccgtgttccttagagttggtattagttacgtcccagtattcagcatgactaacttgttgcttcatatcgatccgctgcattgcgaattgcttgccgtttatcttgttgtgatcatccatagttactttacgaactggcaaatcttcagcgatttcaggaatttctggtttgaataatgtatcaggaataacactgttgtcaggtgcaaacttgtgaattctaaattcaattagtttgaaatcatcagtataaaggttaacgacatcgccatcatggtaatccttgaagtcaactacaacttgaagccgttcaccaggtgttaccaagatcttagtcattttgattggatgaggcaaaaatgaatcgtcacctgcaatttgagtcataactaggtcatcatcaaagtgcaagcgccattcacgacggttagacccacctaagaatagtaaacgaatcttttgtgttgttacatcaacataagggcgaaccgtgccgttgattaatggtgtttcaccgaagacgcccattgcatcataatcagcgcgatagtcaagttgattatctttgtggaaagtacgatcttgcaaaataactggaaactcgtcaacgccatagtttttaggaattgggagtttagcttcgttttcatctgttactactacgcccatagctaatcccatccaaacttgggcagcggtggatggacatgggtgagcatgaagccatgttaaggcagctggttgattaacagtgaattcgatttgcttttcttcacctggataaacaggggcatgacagccaccatcagtaataggaccaggaacttccatgccatgccagtgataagttgttagttctggtaaactgttttttaaggtaacgtgaactcgctggccacgttttaagaccatggttttacctaacaaaggagcgttataaccccaagtcttggtcttagctccaggcaatatttggctttcgctttcaattgattcaagagtgaaccagacatcagtatcagtttccttatccggtgcaaggactggagggacagctaatggctgagcttctacaccttgagggatgcttaatttcttgtagtggaagtggtttttgtcaaaatcttcatcttcgataaagtaattagtgtatatcttatctgtcatcttattaacaccatcctcgtattatataaattgtaattagtcatattgtgataattaatcaaattagtatttgctttttgatcttcacatgttagcctctaattgtcattggctttggtcaactggtctaggttatcacctcctgcagttttgtctgctttataagtctgccacccagacagttcctttatgctctaactcacatgctgtattgattgcttctttttgctagtccttgagcaattgggattaggtgcagctttcaaagaagcaaccagtgaatacttatactggcgagattgaacttaagaactgtaattaggggttaacatgtgaagatcaaaatctatgatcagaaatttgaaagaaaggaggccatttccaatgaaattatttgtcggtattgatgttagttctaaagatttacaggtcgttgcacttgattcagaagatcaaaacaaacgcttaattaacgatagctttgtcaatgatctttatggtgctagtgaactgaaaaaacaaattttagatctagctcaaaataaacactatgatcaaatcattattggcatggaagctacatctatttacagttttcatcctgcttactttttccaaaatgacgaagatttacaaaagctcaatgtagagactgatgtaattaaccccaaagaaaccagcaggtttcataaagtctttgaagaaagtaaaactgatcctctcgatgcttattacattgctttgtatctaagctttggacattatcgagtaagcattgccagacaagacaactatcttgctttagagcgtttaacgcgtaccagatatgaattagttcaagaactgactcgtaccaaacagcacttcattgaagctttatattatcgggttaataaactaatcactgtcgataaagataagattaatactcctcttttcggtgctacaatgatgtctattgtaaccgatagtaaaactctggatgagatcgcggatatgcctaccgaagacttaatttcttacttacaggttaaaggcagaggacgcttttccgatccagataccttggctaaagcaattaagaaagctgttagaggttcatatcgcttaggcaaagtaatgactgattcaattgatgcagtgctttctgttcattacaacatgattcaaagctttaatgaatctattaaagatctagaaaaagcaattgatcgtatcgttgatgcattaccagaaagcaaaattctggaatcaattcccggtattggcaaaacctatacagctggtattatcgctgagatcggaagtatcgatcgctttgataaagaagaacagctggctaagtatgccggcctaacctggaatcaatatcaatcgggagatcacagcaacgaacatactccaatggccaggactggaaacagatatctaagatattacttgattgaagctgccaatctagcaagattacatgatcctgttttcaaaaaatattaccaaaagaagtatgatgaagctgtctactcgccgcataaacgtgcttgcacattaactgcaagaaaattagtacgagttatctttaaattgctcaaagatgacaaactgtacaggacaccgaggtcttaatttcaaaaattggtctaaatttaaaagtaaacaaaagtttaacattaaaaaaatcaacctttaccaaggcttagtttcatatactcaaatttatgatcaaaaagaacaaatatcatcgcctttcatttgacttattaccacatgacttttgacactaacttagcatgattttttaccgttttcaaggcgcaagaacgctgttatttaaaggcttgcatgtctattataactatgtaatgaaaaatatttttactattttgtaatctcttacacttaggtgaattatgttattttacaagatttgttgccttgctaggcttgcgtgtctccggtaaactaagcatgaagaggtgactagatgtataaaattattgcgtgtgacttagatgaaacgttgttgagcgcagatacgcatgtctcagtagaaaatagagaagcgattcaaaaagcagttgctcacggtgtaaaatttgttcctgcaactggacgaggctacgtttctgtccaaaatactttaaaggaaataggattagagcaggcagctaatgaatatgtgatttcattcaatggtgccagcattacagaaaataagaataatcgcgtgctgtattttgacggcttgcctaatgaaattgcggatcggttatatcggcatggggttgaactagatattgccatgcatgtttacactcaagatatggtatatacgtatcatatcgatgatgatgaacgtgcctatatgacgggacgacaccagtttaaagagattgaagataaagacttgtcatttttggaggggcagaaaattgccaaggtgctctatgagagtcttgataataattatttgcaccgaatcgccgctgaattaggaccaattacgcaagaattggatatttcatattcatctaatcgttatttagaatttaaccgtaaaggtgtcaataaaggcgcgggactgatgaagctggctgagcagcttagggtgccgattgaagaaacaattgccattggtgataattttaatgacttgtcaatgattcaggctgctggtgtgggtgttggtgtggctaatgtcaatcctgctatgaaagagcaatgcgattacattactcaggctgataataatcatggtgcagttgccgaggcaattgatcattttatttttaacaattgaaaaaaataaaaaaataattgacagattaaaaatacatgatattattgtttacaacaaataaaaaaatgagctttgataaggaaagtaacttaagaaatgatttgcagagagtcttcggttggtggaagaagataatgatgaattaagtgaaaatcacctttgagctgaaagtgcgatattagcattttcagggtccgccctctatagcggcgacgtatcgctgattttgatagaatcagccgcacgtgcatgaggtagaatttttgtgagtattattctacgaataaataggtggtaccgcgttgaagacgccctattagatcaattgatctagtagggcgtttttttattatcataagcttgttgttaattttttgacttatgggagagataaaaatgagaaaaacattgaagcacttatttggcacgactgtagtagcacttttaggcgtaagtactttatctgcatgttcatcaagccaatctggtgctaaagcacctaaacaagaattgacctggatgactacctcagaaatccaaactatggatccttcaaagatggtagatacaactggtagtgaacaggcatctaatgtttttgaagggctcaatagactgaataaagcgggtaaagttgtatctggtgtggctactaaaactaatcagagtaaagatggtttgacctggacttttactttaagaaagaatgctaagtggtctaatggtgatccagtgaccgctgaagattttgtttattctttaagacggacacttgatcctaagacacaatcacaacagcaaaatgagtggtcaaatgtagttaatgcagatgatgttttagctgggaaaaaagctccgtcgactttaggtgttgaagctaagggtaaatatgaattggtagttcacttgaaacatcccgtaccgtattttaaagccttgtcagttggttggaatccgcaaaataaacacgtagtcgaaaagtttggcaaaaaatacgggactgcatctaagtatatggtttacaatggtccgtttgttcaaaaaggctggactggttcaagtcttaactggaagttagaaaagaatgatcaatattgggacaaagataaagttaaattgcagacggttaattatagtgtacaaaagacgccttcaactgattacaatctgtatcaggctaacaaattagatggtgcctatcttgatgttcaggcttcaaagagactgaagggtcaatctggttatacagtctataaactagatagaactgaatacttgactttcaatgtatccaagcatccagaactagctaatgtcgattttagaagagcagtttcaatggcacttaaccgagctcaattggctaaaacagttggtggtgctaataccgtagctcgaacttttgctggaccaaatgaatatgttgatggtaagaattttgaccagtatgttgaaagcaaaaatccagctaataagtatatgaattataaccctacaggcgctaagaaactttatgatagagcattaaaagaattgggtaagaataagttggcctttaccttaatgggtgacgatgatgacgtttctaaaaaggttttagagtttgtgcaaagtcaattagaagatacctttggcaaaaaagttgatgtaactgttagaagcatgccgaagactactagagttaagaaaatgctcaatggtgatttcgaggcagtctttactggattgacttcgggctatttagatcctaattcacaattgcacacaatgatgacaggacaaagttataacttcggtaaatggtctaacaaagattttgacaagtatatgaataattcagataaggaattaaatcctactaagcgattagaagatttgtataatgcagaacgtgttttaactgatcaacaaggattgacgccattattccatgatggtcaagcttggatggttcgaccaagtgttaaaaatgtagaattcttgggtggtaatttcagctttaaggatgcatctgtaagtaatgattaggagaaaaaataatgactaagacagcttttttaaattgtaatttattcgttggtaatgaagataatctagtagataatgcttggtttgtcgttgatgatgaaacaggtaaattgaccgatcaaggtaagggaaaatgcacagcagattttgacaaacaagttgaccttaaagggaaatatgtgatgagcggtttgcttaattcacatactcacatggggcttgattctgacttgaagaaaaaatttccgactactgaagcttctactacttatgcagcactgcgggatctgcgtgaagctttacaaactggtgtgacttatgttcgtagttgtggcacatcctttgatgttgactgtaaattagtgcagatgcgcaagcagtatccttttgaaggtcctcaagtgatgccaactggaatggcaatgtcaattgtcggcggacatggtgatttcaaggtggggttaaatggagagcaaaatgctagtcatttggttaacggtccagaggacatgcgtcgggcagtgcgtgaacagtttgccaagggtgctaaaaatgttaagctgatggcaactggtggaattatgtcattaggtgatgaagttgatgatactgaactttctcttgaagaaatgaagatggcagtagaagaagctcattctaagcatatgacggtttgtgcccatgctgaggggagacgcggtattcattatgcggttgttgctggtgtcgactcagttgaacatggtttttatctggatgaagatgatttagccttaatgaaaaagcaaggtacttttttatcaccaacattgactgcaggtcggacaatcgtcgttcatggaaaagatgttgtacctgagttctcataccgcaagatgtgtgcagtagttgatgacttttataatcatgttggacatgcaattaaggaaggggtgaaattggcaatgggtaccgatgcaggaacatacttcaatcgcttttctgatacaccaaatgagttggtggaattagttagagcaggagccacaaattatcaagctttaagagcaggcggcttgggtagtgctgaattgcttaaggttgatcaagaatatggttcacttgaagtgggaaaatatgcggatttcttagttttacgagagaatccattagaaaatgttgctgcagttggtcaaaaagataaacaagtttaccaacatggtttacgtaaattctaaatattttttaccacaaataaggcatcctcgtgagatttttcttgcggggatgcttgtttgtgtagttcaaattaaagtaaacattttactaaattctccagtaaaagcgaataaacataacccaaaatgtaaaaatagttcttgatttagtatgaattacgatgtagtatttaaaccatcaaacgtattactgatgatttgaataagtggagattgaaatgtcaagttttcaagaatactactcagaattacaggaactagcagggtatttactacacaatccagaattaggctataaggagtataaaacttctaaggcagtggaagcagaaattgctaagatttctactaatataaaaatcgaacattattgtaaaacaggacttaaggtaatgtttgataatcattgcccaaaaactattgggattattgcagaattggattcactttatcagccaggtcataaggatgctgaccctgaaacaggagcggcgcaagcttgtggtcactatactcaggtgacaacagccttggctttgataaatgaactgatgaaaaatgatcgtctcaacgagtttggcactaatttggcttttatttttactccagccgaagaatttgtagatcttaattggcgcaaaaagcataagttagctggtgattttacttactttggaggtaagcaggaagccatcaaacttggcgtatttgacgatattgattattgtgtatcagttcatgctataggtgaagattttgagcgtaggactattgaaattaattgtgatttagctggatttaattttcaatactttgacttctttggtaaggcgagtcatgcagcatttgctcctgaagagggggtaaatgcacagagtatagccaccctatttaccactgctttggccttcaaacgtcaacaattaaaaaatccaaatcaaattaggtttaatccagtgatgataggtgataatacagaatcgattaatgtaattcccgatcatgttagcatggggacagatatacgatactttgatgtcgaatatgcacagcaactaatgaagcaattcaatcaagcagcagaaggatgctccctagctttaggcggtaattttaagtcagaaacacaggttggctatttgcctttaaggtcgaatagagacatgaatgctttagtaaaaaatgtatttttaaggaatgacaagatttcagaattgattgaaaaccgaggctataccatggcagctggtgatattggtgatgtaagttatctaatgccaactattcagattggatatggtggttggaatggaaccattcatggctctgattttaaattagttgatccagtttttgtactggacatattcccggaatttatctttaacagtgttttagaaatatcaaataatcttaataaaatcaggacttatcgtagaacaaatcaggaatatcttgaacaattaaataaaatgggagcagaaaaatgaaatctttaaaaaattatggtccattaattattttagtgctattgattgacactattgcggaatttatagggatgcaggttttcaaaattggtaaaattgaagtttcaattctaccattagtattcgcagttattttagcgattattatttatttacttccattaaagccgattaagcaactctacaatgataaaagagtaaagtttgctggaaaatatatgattttaataatgttgccactaatggcacgttatggagcaaatgttgcacctaagattaatgaaattttatcagtaggttgggtatttctcattcatgagttaggtaatttaggtacaattttatttggactaccagtagctttattactaggattaagacaagaggccattggctcaacattgggattaggcagagaaggagaactagcctatattagtgaaaaatatacacttgattcaccggaaggtcgaggagtcctaggtatttacttaattggaacaatttttggttcgattgtcttctcaattttagcaccagttcttttggggatgggctttagttatcaagctgttgcgatgagttctggagtaggatcaagttctatgatgactgcagcttcttcagctttagcagctctggttcctaaacatagtgagacgattctatcatttgcggcagcaagtcagttgttaactagttttattggaacttatattatgtatttcctcgcagttcctttgcaaagattcatgtatgttcacttgactagtttgcttgataaaaagaaagaagtatacccagaacatgattagagaaaataatttttataaattaggtagagatgcattaattttattgcttagtgttagtttagttttatttgttcagtggattaagttagtaaaaaatcctaagagcaccccaattacacctgatacttttgccggcctaggtctattatggctgttttctctgattggcattattatcagtatgttaatgaaacgagttccgtggaagattgttagaggatttcccattctaggctgggtgtctatcgtttcattagttttctgtttgcttagtccatattgtgttcgtgtaattaatgcagtagattttttatcattaactacatcggtattagcctttgccggaatttcagtaactcatagattgaaggatttatcaaagatttcatggaagatcttaattgtggcattatttgtctttttcggtatgtatttcatggatactttgatttctcaaatagctcttaatttgagtggaaaatagaaaaaatacgcgtggtgctagttaaatcgttctagacaataagccaaattataagctaaaattgcaatttccaaccggctttgaaagcctatcagactacgtgctcgattgttctcggcattgtaataggtcagaagcgaaaagtcgctttcaattgttctgcgaatagccatcaattgatgatcattgtgctttttagctcctgtcatatttttacgatatggtgtccaaagttcgtaacccatttgttttagctgttgatgcagttctttgcctaaatagccttcgtcgccaagaagatagtaattagatggatgggtattttctatcagttcaactgtctccctggcatcatgaactgatgcctttgttacgacataatcaagaatgtaaccgtcatcgctaacaatggcatgaactttgaaaccatagaagtaaattttcttggtggccttataaccaatgttggcataaccgcgaaaaattttagcacgatagtttcgaattggttggcaaacaggtaccggaaagctgtcaatgatcaagaactgtccattcaggtcaacctttttattcatttcttgccgtatctgataaatcaattgcaatagctgacgtgaacgccgattaaaacgtgagtgtgataaacaattgaaacattcacagaatcttctttgtgattcaattcctgtcttagcttgccagataagtaaagccaaaatcagactgtccgtagttttaatttgatcaatatttcgccgatgagtaaactcagccggtgcatacaaacgataccagtgccgacaaattatcactaaatctttaaaactaacttgtaaatggtggctaaaacgcttaagcttaaggcagttcaatcagatcagactcttttctattattactatttacaagtcgagtctaacaagattggacttttttattaactaaaacgatttaactagcaccacgcgtaaaaaatatataaagccacgctcaacagcgtggctttttgaagtgtgtcgggcatgacattcatctagtccaatgaaagcttggcgtaccgcaaggtggaccgctctcgccaatcctatccaatatctatttagataaaatggacaaggaattggaacaaagaggcttgcgctttgttcgctatgtcgatgactgcaatatcttcgtcaagagtggtaagtcggctaagcgcgtgatgaagtcaattacatcatggctagaaagaaaactgttcttaaaagttaacactactaaaactaaagtagttagaccaacgaagagcaatttcctaggctttaccttctggaaaacgggcgaaaactggcaagcaaggccgggagacgaccgtaaagccaagctttatgacaagattagagaattgttgagtcgccataaagcagttgctcaacctctatcattagtctttactaagataaatcaagtggtcaaaggctggggtgcaggcgtttttggctttaacgcaaaagaagtcgcaaaaatgtggcaggaggcctttgatactccgacaagcatctccactgtgatttacgctgttattcctggcagaaagaataaagacgtggtagctgattttaaggatatttttgcttaaatagaaattttctctcaaataacaatccaaacaaaaaagacgagccaatgcccgtctttttattttcttgaaataaatttttagttaaaagttagcttttttaacgtaagtgttcttagaaatacgatagaaagtcttgccgtgtaatttaattgcgcgaccataagtgttaacgcggtgacctttcttcaaaactttcttattagcacgcttgccgttcttcttgtagacataagcattgtgcttcagagtccgcttaacggccttagctttcttggcagctgtctttttagcagcagcggcatcagtttgagtcttgtcagatgtagtattggcatctttattagcagtgtcttcagcgaccttacctaaagtaatatcagccttttcgttcatggtcttgcccataacgttaagaccgaattctaagctgccagcgccttctttataagcatctgctgagaaaacatagtcaagggatgagccgtctttagcaacattttcttgcttgccggctacaccattcaatgttaggctagcaaccatcttagacatgtcttgacctttggtcattggtgctttagagccatcaacgtgaataattacttcggtaactttaccgtctttaacattaacttgagcagagttgcccaagaacatagcagcttctgatggggtagtgctgccagttttggtaatagtcatagtgatagtttgcaagtcgctgttttgactagtagcagtagttgcagcaacattagtagcaggctgatcagctgcagacactacagctgatggtgccaaaacactagcgcttgcgagtaaagcaagtgatgttaaaatgattttagtattttttttcataaaagtttcctcccacgaattttaggtatcgcttacattataatcaaataaatgttataaatcaatatatttttttgttattttattttttatgagcataataaactgaataaaatatcaccttgaaaccgattgcatagttattttaagaactttataatagaaaagactaatagtaaaaagaaggatattagaatgaataaaaagttacttaagttaatcgcaagtagttcggtcgcaatgactttaatggcacctggagtggcatttatgcaaactaatccggttgtaatggccgctgaacaaagtcaaaagacagtgggaatgacggtttacaaatacagtaaaaatcaccgcagccatgctaagtcaatggctcaaggttttgtgggagataaggtgcaattaacagttagtcaaaagcatgtgactaagatgacaatccatgtcgatggtaaaaatagtccaatgggcaaggggcaaaacgtaaataagattgtaaaatccctcaagattaatggcgttagcggtaaaaaggaaaatgtttccgccgacaaatctagttttgactttgtttttgcaggaaaagctttcaaaaataatggttgggtcaagatgcaagtcactattgactttggtggtaagatgaccgaacaagcttgggtgaagtatgacaaggttagcggtttaactactagcaagaaaaagaccgacaagaagcaaaagaaggctagtaaaaagagcgtcaaaaaagttagtaagaaaagtacacacggtcagcgcggataaaaaggttcaaaatatcaattatgcggtctataaggcggatcgcagtggcgtttctgcagcaaataatttttacactcatcatgccaggattgaaaaagtaaagcaggactatgttatgaccttaaaagttgaggtaaagcatgggatggtgaccaaatttcagccggtttcactgggaattggttcaatttcaaacctgcgttttaccaaacaagctggcaaggatatctggacttatcaggtacacttcaagtcgctaaatcagttgaagaagcaggctcaggggagtctgcgcttgagcgtaccaattgccaatattcatgatcgtttgtttaaggtctggtttgcttttggtgtaaaaaatgtggcgcacagttcgactgtaagcaaggcattaaccgaagcaaatagtagcactgattcaagtagtactagtgatgctattactgcagctaatgacgacagtagtaaagatgcaaaaaatgctacaagtagcgctcaaccgcagtcaaagccagttaaaaagcagcaggcttcttcaaactctagcgtaaagccttcggcaaagacaacccccaagaagaaaaagatggcaacgattgcagcggtggaatatccatttttgcctgtgatcgcaggctttttagcatttgatgctgcaattattggtttggccttttacttaagaaataaaattttgaagagaaagaaataatgaaaaatatagctaaaattatctcttttcctttcttgttgctaacttgtttgtttatttttggtgtgactgttagtgcacaaagcgtgagttatcgcacttacaagtatggcacgcatcagacctcgatggctgatggctactatgcgcgtcctgctcaggttgtggtagacgacaatcagtacctggtaacgatgacgattcgcactaagaaagatctaagtccctatccggttcaggtgttaacgattgatggacaagcaccgctaaacgtagtaaaaacgcggcatggcagtgactatgattatcgctatagttttcgcactaataatttaaaacgtgatatttctagtcaaattaaaatagatgtgccacatgtttaccaagcaacacacaatattacttttgcttttgacactacacagttgcctaagttaacaaataaaaaagagcgagcaagtcatgcagaaagtgcgataaaacgcagcgcgccacaggtgaaaaacaagagtgttaagcctaaggagcaattggcacaaaagaagcaagcggcaatagctaacaggcaaatagcgcagaatgcacgcaatcaacgtgctaatcaacaaaggcagcgaaatttttattatgttattttggctggagtgcttagttcgttaattttaattggcgttgctgttttgattgtcgtaaatgccaaggaaagaaaaagtaaatgaaaaaacgtaaaggattaattattggtttaattatatttttagtagcaatcgtcggagtggcaattggtgctaaacgattgattgatcaaaaagttgccaataatgaaaagattgttgccacaagtgcagcgattactgaaatttttgataaattgaacgttaatttagcaggggttccaaagacgcaggctaagttaccagcacgctatcaaaaggtgcccaagattgggagtccaatgaagccaagtgttgaaaagattgcttctttgaatcccactcgtgtctatgcagtctcaactttaaaagatcagtatgatcaatcatttaaagaacaaggcgttaaagttacatatttgaagctggattcagtagctgaccttgaagctacactgagttcattaggcaaacagtattaccggcagagacaggctgattatcagattggcttaatcaaaaaagccgttaaaaaggctaaagcacgtgttcacggtcgtaagcctagagtattgatcttgatgggcttgcctggcgctaattacatgattctaactaatcgatcatatttaggtgatttggtcagaatagctggtggggaaaatatctatcactctgatagtcagatttatttgtcaccaagtaatgactcgctagctactaaaaatccagatgtcattttgcgattagaacatgctttaccaaatgtaactttgccacaatttaagcaagagtttaagaaaaattctgtttggaagacgatgaaagccgtaaagacaggcagagtttatgacctacagcaaccagactttaatgcttcagctaacatgaatgtttctcaagcattgaataaattaagcaactggttgtaccctggaaagtgatcaaaatgaagaaaaaggtaatttggataaacttgattttagcagttttgttaatcagtacgattttctttgcattaactcacggagcaagcaatttttcaatgcaaaagatgactaacagccaattgaatattttgtttaatatccgtgtcccgcggattatttcggcactagtagcaggagctagcctctctgttagtggtgccttttttcaggcaactttgcgcaatccgattgcagaacctggaattatggggatctctagtgcagccagtttatgtcaattgctagcggttattattttgccagaaattttctttggtaaaattattttcgcgattattggcggactgctagcgtttgggcttcttttattattccaaaaaaagatgacgccttatcagttaattatcatcggagtggcattgaatgcagtgttcacggggatgcaggaagttttcactaatagtcaaaatagtggcagcagcctggccacaagtagttggggatcgacgatgtatttattgattattggcgtagtagggctgattttcgcgatttgttttatgaattgggctaattacttgaaggtcaatgatgaagagctgacgtctttaggtgtttctgctaaaaccctgcgtttagtcttgatgctaattgcagtggttttggccgcaacaacaacggcttgcattggtgttttagcttttatcggaattattgtgccacaggttgctcgtttgcttttgggatatgattatcaaaaaatcattccattttcgatttttgctggagcttggtttttattgttcgttgacaccatcggccgggtgattacagcaccgaatgagattgcggctaatattattttggctattgttggtggtccagttatgattttaattttatggaagaggcagaaaaatgcttaaagcgtcgcagattgatttttcatatgggtcaaaacaattatttaatcaattctctctgagcctgcaggagcaccagattacgactttaattggtcctaatggatctggcaagtcaaccttgtttcgcttgcttacacgggcaataaggccgtctgcggggacaattacgctagatgggcaagatatctggcagctagctgcgaaggattttgccaaaaaggtagcaattgtccaccagcagaatcaattgtatgatcagataactgtcaaggaactggttaaaatggggcgtctgccgtatcattccttgatgggggatgaagaaaatggatctgctcgccttcaacagattatgcaggagctagagattgctgatttggcagataagtttatagcgcaattatctggcggtcagcagcagcgtgtgtggcttgctacagcactggcgcaagagccggaatatctttttctagatgaaccaacaacatacttggatttgcattttcagtatcgctttttggatttagtgaaaaaattgaatcgaaagcagaatttgacgatttgcatgattttgcacgatttgaatcaggctttgcaatatagtaatcaggtaattttgctcaaccaaggcaggattcaaaagcagggcaggccagaagaggtaattacggcgcagacgattaggcaaaactttggcatagattgcgagatgatcgaaactgagcagggaaaagtcttgttaatggcaggttctgaggcaaaataaaagaccacgagaaaactcgcggtcttttttgtaatataaattattacttgttaacttcatccttgaagctcttacctggcttgaatgctggaacgtttgatgcagcaatttcaatttccttaccagtttgtgggttacgacccttacgagcagcacggtgacgaagttcgaaggcaccgaagccaactaattgtaccttgttgccttcagcaacattgctcttaacaacgtcgatgtaagcgtccaaaatagtgttaatgtctgtcttagtagcatcagtctttgcagcgatttgatctactaattgtttcttagaaatagtttccatgaaaaatacctcttttaatataaactacgattacttattttaacagtaatccgcgtatttacaaggggaaacagcctctttaaagaatttttttaaaaaggaaagaaattctatgtatttgaagcgaaaaatattgtattcgctatcaaaaatgtagttcatgtaatgattcttttgttttgatttgaaaaattaacttttttcaaaaaatttagacattttttgcgtaataaatgatgggagacaagcctaaattttgaattccaaattttgtacagtgatggaatatataagagaggtgaataatctttaattacacaaaccacatcctcgaaatatgcttaaacaatatcaattaagaacgttgaagaatggattaagaatggcaggtataagactatgagcctactaacttataaaggttaccaaggtacttatcgaagttgaaaatgatactttatttggcgaagtcttaggtctagaaaatacttttatttcttatgaaggaaattctctggcagagttgaagaaagatttcaaagcgggtattgatgattatcttgagaattgtcaattgaatcatgagcaaccagaacaggctaaccaagatgcagctaagttacagttgcaaaaattattattaacatcattagcgtgattggaacaaaataaagctcgaaacttctacaaattgtagtaacttcgagctctgcattaatctgtttttgttcaatacaacgcatgctattacatattggcaaatcgatctagttcatcatgtgttcctaatgcaaccaaaactaggattagttcatgtgtttctttatcaatccggtagtacaatagccaatcgtcattatattgacgattaacgtgcattttgcgattttttcctacagggtgatctttatgtttggctagaaattctttgtcattggttaatattgcttcaacacaatcatcaacataatccattggataatgttttctttcatatctcttgtaagcgcggtagtagcgcttggtaggattaacttgcatgattatttccgcatggcctttttgtattcttcaaaagagctataacttccatgataaatgtgattatcagcttcatagttcgcttcatctagttctgtcatgggtcttagttctaaaggaatgccattacttctaacaatagctttgaaatacattctaattcctgttgatatgtcaaccccatatgaagcaagaatatcttgagcttctttttttaatttatcatcgatttttacactaatttgagccatagtacaacctctattcacaaaacgtattactttatctatatagtactatatactataaatacaaaatatcaatttttagcgtttgcttttaaaagaattttaaaagattataggtagtcttattatgaatactaggggaaaaaactaaaagtgacatttatatctttaatcgtaatacaccagcagaaatttaaacataaacaaagctcgaagcttctacaaattgtagtaacttcgagctttttgtaactattcagaaaagataatttagcggtcttcgtggttagtgaagtaacggtagtccttactcttgtcgaacaatacggcacgagcgttttcaccgttggagattgagaagatagcgtcagggtacttgttcttaacttcatcttctaccaatcctctaagcatttcgttgttagctaaaactgaaccggttaaagcaatcttcattggcttaggatcttcgtaacggtcaagaccgatgatgatgtcacgggctaacagatgagcttgtttcttaataactttgattgcatcatcgctgccttcatcagcaagttgtgcaacgtgaacagccattcctgcaacttctgggttagacatcttgtagaatttagcgttacattcatccatgtgttcaacgccaaataatttagtaaacatttgaatcaaagcgttgtcttcacgcttgtcccagctaagaagagcagattgcattgctgaacgagcaattgcgtaacctgagccttcatcacctaagatgttgccgtagccaccaactgcgattaagtggccgttttgtaaaccgttgtaaactgagccagtaccggcaattactaaggcaccgtcatcaccttcaagaccagcgtaaagtgctaaaagtgaatcagtaatagcacgagtaggtaagttgttaattcttgatgaaatagttgcggcaacttctggagcattaccgacaactgaaagaccggcaataccaacaagaacgcgcatgcagtcaccatcaaccttgtcgatcaattcgttgatagtgtcagagatattcttaattccgccttcgtagtcagcgttaatttggcctgggccgccttctgcacgaccgatttccttgccagtttcgtcatatgcgattgcagttgagtgggtaccacctgcatcaacaccaatttggtatttaagagccatgttgtaaatcttctttctatattaatttatccgaatgataacgtatacattgtattatatttttatacagtaggtctagtaaaagttttgctgttagcgctaacagtggcttttttcttgcaaattaataaaattgttaaactaattaagctaaccaacatccccagtagaagaacccatggtacataaattaatgtaatttgatgttttcctggattcaacttgaagtttaaaaaagcattcatgaacaaggttttattcttgttaattattttgccattatctaaaactaaccagttaatgttattaggaatagttgacgccaatgtcatcatcttcttcgttgtgaaatgattagatttgatgatcaaagcagatgtttgtttaaagtttggttgtttttgcttaaaacgatgtataatctgctcgagcttttgtgtgtttaagcgccagaagtgaatgccactaaggtctagtttatctttttttagttcaaaagtaacttgcaaccgttgaccacgctggtggctacctagattaatgagacgggcattttgatcacgtactgccagattaatattagcaccattaactgtcattgaaatggcattatcatcgatctcaccgggcatttcaatgtagtaagaatcatcagtctgtggtttgaaattgaaaatgatgcgtgcgatttgcttattgtttttacgattatattgtagttgatcgtttttcatactagttacattaattaattttgctttaggccaattgatctgcttaaacagctgcacttttgcccctgtaactgcttgaaagaatttggtttgattactagtaatatctagagagttaaaattgattttttgcgttttttgtgatgttaaaaagagtaggggcaaagcggcattatttttcactagatatagttgggaaaagcgtttttgcaaatgataatcgctggcatcaacgcggtggttggaattgtcatacttcatttgcttaccagacttgatcgttgtgatttcatcattgggcaaaagataatatttgattccaagtaaatcatctgtcaaagtagttccgccaaaattagtgtaggaattactattgtttagaaatccaagattgttgatcaggttgagtactttttgatcagaaatcgaattaaaattacttaaaccgtaataaccagcgctaaaaggatcatcatcagaacgatagaaagtcttttcagttcggtaaaatccagaatcatgttgatttgcgtattgtactgcttggctgacattagtggtaaagttctgataatcgctatttttttgataagctaaattgcctagagatagtactaggttgacgattaactcaagctcgataactaaataaaaaaatggcgcggcaaaactgtgttgatgataaataaagccaataaacaagattccgagggctagaaaagctcccgtggcaatctgcgcatcttcagttagaaagtcaaaatgtgaggcattaaatactatataaacaattaaacctaaagaaaatagagtcagaagtccggtctgccaataagctatacgttctttttgttctaatgcaataacgcctagatttagcgcaaaaaagatcaacacaaagctgaaacgaccaggataccagacagggaattggcctaaatgccagagtaaaaccagtggtgtccaaaaaagagaagcaattaagaaaatgagtaaaattccgtttgctaatttacgctgccagttaatctttttgcttaaaaaatataaaattgtcagcaacaagaaaggcattgtcagataaatgttgggcatcccttcctgcatttcatgaaagttataggccccttcggctaacttagtcagctgttcaactggagaaaactgccagcccaaattccatgaggcagtagaactagccttgccttgcaacatttcaatcagaacggggaagagcataaaggcatctaaaaatgaaccagcgatactttttcttaaataaatccagttaaggcgtaggcgctcctgcttattgatgaagaaaattttgcttaacagataaagcaaaccaaaggctaatgccataaatccggtataaaaattagtgaaccaaagcaaaaaggtaattaaaattaacttattttttcgttgggccagcaagcggtcgatggcattaatcaataaaggaagcaaaatcacagaatcaagccacatcagattatagtgattgccaataacgtagcctgaaagggcataagccgaactagccgctaaagcgtaaaagtgattagtgattttttgcttccaatagtagtaggaagatagtcccgccgctccaatttttaatgcgataataattaaaattgcttgtggcaaaaaatgttgcggaaataaaaataagagtagattgaaaggactgcagagataataggcatcagttgctagcattgaaccgcctaaaccattagaaaaggaatagattaagcgcaagggatgggagaacaaatttcgcctgaagaaggcaagaaaatcaacatattgttgacctaagtcgacagtgagcactccatttttgctgtagaaaaagtaactcaagaaaatcaaagccggtagcaaaaaactaagccagaaaaaaatatttttacgattaattgcaatgtgtcgtgagttaagaaatttaagcatcattaaaaattatataagctcccttatgaattgtagaattgatgtttactttttgttaaaatacatctagttttaataaaggtgatttacgtgaattattttagaaaaaatagtgggactggctcaaacaagcattcctcaactccaattagaatgcgaatcattctaggggtaattttagtcctctttgccatgttaattgggcaattggcttatttgcaactagtttatggttcacgtttcaaggcagaagtgcaaaaaactgattcaactgttgtttcgcatcaagtgccacgtggtgtcatgtatgacgctaagggacgcgttttagtaggtaataaagcaaccaatgctattacttatactaagagtgcctcgactacaacagcagatatttacaagatatctaatgccttgagtaattatatcaagattagcgatgaaaagccgacaaagcaaatggcagcagattattatttagctaatgaagataataatactaagatatctaatgctttgccgaagtcagccaagattgatgctgatggcaataagaagacttcagctgaaatctatcaagcggaattggcttatgttgaaaaaatgaatcctcaactaaccactcggcaaaaaacagcggctttaatctttaataagatttcaggggcttatactttatccacgatttatatcaagaataaaggcttaaccgatcgtgaaattgcccaagtaggtgagcacttatcagagcttcctggtgtgggtatcggaactgactggcaaagatcttatccaaatggttcatctattcaaagtatcattggttcggtttcaactgaaaaatctggtttaccaagtgatagcttgcagtactacttaagaaatggttactcacgtaacgaccgggtaggtacttcctatcttgaaaaagaatatgagccacttttgaagggaactaagtcgactaaccaggttattactaaatcgaatggtaatatccagcagactaagactgtttataatggtcaagccggtgccagcttaatgttaacgattgacgctaagtatcaaaagcaagtacaggctactttgaaacgggtttacagtacagctgttggtaacggtgcagcaagatactctaatggtgcctatgccgtggcgatgaatcctcagactggtgctttgctagctgtagccgggattaatcgaaacacgaacactggtaaaacgactgataatgctttaggtgtaattaaccaatcctttgttatgggatcagttgttaagggggctactgttggtggtggattaattaataaggttattactcccgaaaacaatactttgcctgatacggcaatttatttgccaggttcaccagttaaaaagtcagtttatccagttggtactttcagttcattggatgctgaaacagcgttggaagtctccagtaatatttacatgatgcacttagcaatgaaatgggttaaggctagttatgtaccgaagagctacattcatatgccaaacgatgcctttgacattttacggcgtaattttgctatgtttggcttaggtcaaaagacaggcgttgacctacctggtgaagtgtcaggaattgaaggtaagtcatttaatgacaagggtaatattctttccggttctgtacttgacctagcttatggtaactatgatgcttatacaccaattcaattagcccaatatgtgtcaactattgctaatggtggtaagagattgcaaccttatattgtgcaatcagttggtaaaactagcaaagatggtaagaagatttacattagctacaataagaagccaaatgtccaacaagtaattccttggacgcttgcggaacttaatgtggttcaaacagggttctatcgtgttgttcacggtacgaatggttggggaactgctcacccattgaagaatgttaagccatcaatttttggtaagaccggtactgcacaaactttctactatgatgctgaacaccctaatagaaagcacaatatcgaattgattaacacaacctttattggctatgctccatcgaaaaatccaaaattagcagtggcggttgttttcccaggattagaccctgatggtgaaggaacatacacattgcaagttgccaaagcaatggtacaagattatttcaaacttcattcaacaaaataaagaataatactggtcaaacagcttgaaaaatgctattctagtacagtcagaataaaagtgtaggtggtgaaaaaaatggcagataacatcattttagaatgcaccgaatgtggcgatagaagttacttatctaagaaaaacaagcgtaagcatccggaacgtttatctttaaagaagtattgcccagttgaaagacgcgcaacacttcaccgtgaaactaagtaataaaccaagatagcaggctacgtgcctgctattttttgttttttggacaaaaagatggaaaaatcagaattaagaaaagaacaaatcagtaaattaaaagaatttgccaatactaaagaaaaaagagcagaagatgcgattttattagagaaattaatgtcgacagatctaattagaagaagtcagacgattggggtaactgcttctttaccactagaagtagatacttctgaattaattgctcgtttgtgggataaaggaaaagaagtttatctggcaaaggcacgaagcgatcaaaatcatactttagactttttacgctatacgtatatgagcaaattggtaaaatctaaattcggtgtggaagaagtcgccgatgaagatgcgaaaatcaataatgatttggatttagtcattgtgccaggtttagcctttgccttagattcgcatattcgacttggctttggtggaggttattatgatcgctttttggctaagcatgatcctaaaactgttgctttagccaatagcaagatgacgttcgatactagcatttggcctatcgaaaaaaccgatattccggttcaaacaattgttactcctgataaaatttattaaaatagtcacaatgacgaagataaggggggattaaatgaatactaaacgaaaaattaacctctcacaatcatttgtgactttaggaattttagtagttttattaatagtctttttagttgaagtgtttttaggtggctcagagaataccaatgtcttgatgaaaatgggagccatgaataattttgcggtggtggctggacaccaatggtggcgcctatttatggcccagtttttgcatattggcatcatgcatttggtttctaatgccattattatttactacatggggcagtatatggagccattaatgggacatgtgcgctttttagtgacttatcttttagctggggtcggcggcaatctaatgagcttggctttcagtgctgatcgcggcttaagtgctggtgcctcaacagctttatttggtttgtttggggcaatgactgccattggcttgcgcaatttgcataatccaatgattgcttttttaggtcgacaagcctttgtcttagctttgattaacttagcgcttgatatttttgtgcctggaattgatatctggggtcatattggtggcttaattgctggcttcttattagcgattatcttgggcgatcgtgtaatgaagacctacaatcctaagtggcgcgtattggctgctgcagtgttagtcgtatatgttgtttggacggttagaacaggaatgataattaatttctaatgaaaactctctacgatgtacaacaattattagaaaaatacggaattttggttcatgttggcaaaagaatttgggatattgaattaatggctttagagctcgacaatatcaatcgtgccggtctgattgaccaacatgattatttgattgccaagatgattttgagtcgagaacatcgaattgaagtcaaaaatgaacaaaaaaaggcgcttaaagatccgaaaaatgatagccagtaaattagtttagcggtatcataatagatgtaagtttttatgaaagggcagatttagtttatgtcgagttttttaattgtcttagatttagttttattagtcattattttagtcatggttggtatctgggcttggaataaaattcaagctaaatcaattggtggcgaattgactaatgaagaatttaaagaaggcatgcgtaaggcacaaattattgatctgcgtgaaaaagaaccgtttaaacgcaagcatattgatggcgctcgcaacttgccatataccatgcttaagtatcaatatactgagcttagaagcgacttgccagtttatctttactcagattcaaagaccattactttgagagctgcccgttttttaaagaaaaagggttttgtttctatccattggcttaaagatggctttgaagcttgggatggtcgaactaagaagtcaaaatattaaatgaaaagaagacgcatttggagggggtaactctaatgcgctctttttttgtatcaaaattaagaaaggtgatggggatgaaaaaggtactagcgattgtaggaccaacagctattggtaagacagacttggcgattgatttagctaaaaggttgaacggtgagattatttctggcgattccatgcaggtttaccaagaagtggcagtgggaactgcaaaggcaactgcagaagaacaagcgcaagtgaaacactacttagttgatacgcaatccgtttttgacgagtattcagttaaagattttgtggatcaagcaacaaaagcgattgaagagattagccaaaaaggtaagttaccaattattgcaggcgggacaggtttttatgttaatgctttattgaataagatgcagctaggcgagaaaactccagaagagcgtagcgtttcgcaaaagtgggaaaactacctcaaggaaaaaggcgcagaaaaattgtggcaggtcttgaatgagcaagatcctaaggcggcagaaaaaataccagtagccaatagtcgcagaactatgcgagcattgactgtgattgagcgtacaggcaaaaagttttcagagcaacaaaagcagatcgagccccgttatgattacttgattattggcttgaattctgaccgtcaagagatatatcgcaggattaatttgcgtgttgataagatgatggagcaagggatgctcgatgaagcaaaatttatttatcaaaatcgagcacgagagtatcaggtcttgcaagcaattgcgtataaggaatttttcccttattttgaagggcaagagacgctagagcattgcattgaagatttaaagacagcttcgcgccgctatgctaaacgtcaattgacttattttagaaataaattaccagtagtttggtttgatccgttagatgatccgggttgcgaacaaaagatattgaagaaagtcaaggaagggaaaaatgaataatttgccagaaaaattacaaaaaattgttaaagaagttgatcaacagatcgcacctaaactggctgagattgaagatcaaattgtttataatacggctaaagttttggcggcttaccaagctaatgatgtcgctgaagctgacttgaatggggctaatggctatggcgacgatgatatgggaagagataagctagataagatctatgctcaagtttttcaaactgaagatgcggtagttcggcctcaatttgtttcaggtacgcacaccttgtttgtagctctagcaggcaatttgaaatacggcgatacgctaacttatttaactggacagccttacgatactttgcaaaaagtgattggcttgactgatgataagcgtggtactttagtcgagcgcggcgtgcatttttcatatgtgccgttaaccgatgatgggttagttgattatgacgcagctgaaaaggttcttaaacgtgatcaacctaagatcgttgccattcaacgctcacgtggctactctactagaaaaacttttactgtcgatcagataaaggatatgatttcctttatcaagcgagttagtccgaagagtatcgtctttatcgataattgctatggtgaattttcagaaaaacatgagccaactgagtatggtgctgacttaatggcaggatcgctgattaagaatgctggtggtggtctagctaagaccggtggttatattgttggtaaaaaagacctggttgaaaatgcaaaacttgcattgactgctccaggctgcaccgatgagggcgccactattggcaatttgcatgacttttatgaaggctttttcttggctcctaatgttaccggtatggctgaaaagggaatgatttttgcggctgctttgtttgccaaaatgggcttgaatgttaccccagcttgggatgagaagcgaagcgatattattgagacaattatttttggtgatcctgataagatggttaaatttgtgcaagaagtacagaaaaactcaccgattgattcctttgtaacgcctgaagctgtgcatatggagggctacgaagataagattattatggctgctggtaattttgtttcgggttcaactattgaattttcagcggatggtccaattagaccaccttatgcggtttatatgcagggtggcttgacttatgcgcatgacaaagtagctattattaacgcggttcgtgatacattttttaacaaaaaataaaatttaaaaataatcactagaccaatttgacttttttaaattggtctgctattgtattaaacagttctaggagataagaataaatcataggaccataccaatttaatattttttgtttttataggtgaattaactatgagtaaacaatatactgcagaagaaattaagcaagaagttgaagacaaggacgttagatttttacgcttggccttcactgatattaacggtactgaaaaggccgttgaagtacctaagagtcaattagataaagttttgactaatgacattcgctttgatggttcttcaattgatggctttgttcgtcttgaagaaagtgacatggttttatatccagacttctcaacttggacagtattgccatggggtgacgaacacggtggtaagattggtcgtttgatttgttcagttcacaccactgatggcaagccatttgctggtgatccaagaaataacttgaagcgtgttcttggtgaaatgaatgaagctggattcgacacttttgatattggttttgaaatggaattccatcttttcaagttagacgaagatggcaattggactactgaagttccagatcatgcttcatactttgacatgacttcagacgatgaaggtgcaagatgccgtcgtgaaatcgttgaaactcttgagggcatgggctttgaagttgaagcagctcaccacgaagtaggtgatggtcaacaagaaatcgactttagattcgatgatgctttgactactgctgacagatgccaaacctttaagatggtaacgcgtgcaattgctagaaagcacggtttgtttgcaagctttatggctaagcctgttcaaggtcaagctggtaacgggatgcacaacaacatgtcattatttaagaatggcaagaacgtcttttatgacaaggatggcgaattccacctttcaaatactgctctttacttcttgaatggtattttggaacatgctcgtgccattactgcaattggtaacccaaccgttaactcatacaagcgtttaattccaggttttgaagctccagtttacattgcttgggctgctaagaaccgttcaccacttgtacgtattccaagtgctggtgaaatcaatactcgtttggaaatgcgttcagctgatccaactgctaacccatacttgttacttgctgcatgtttaactgctggtttgaatggtattaaagaacaaaagatgccaatgaagccagttgaagaaaacatctttgaaatgactgaagaagaaagagcagaacatggtattaagccattaccaactactcttcacaacgcaattaaggccttcaagaaagatgatttaattaagagctcattaggtgatcacttaatgcacagcttcattgaatcaaaggaattagaatggtctaagtactcacaatcagtttcagattgggaacgtcaacgttacatgaactggtaaaaataaataagtaattggaaaatctcgtggtgattgaggccacgagatttttttgtaaagtatagatttttcaaaagcatatctaatcgtaattagtctaattacgattagataagtgaacttatggataagtttttaaatctagtaggataaacttttaccaaaaatcaaaaaatattctcttcaaagaagagcaaactgctatataattgtaataatgactggactggtatccctaattagtttagggatacttttgtgttaatgagaatgtattggagtcgatggaatgagaaataagacattagtagcattttgtttgatagctgcaatgatcaatttaactgcttgccaatcgcaaaagcagactaataatcgccaaactattgaaaaatctggtgtgactcagaaacagactcccaaaagattaattgttaagagtatgtcagatactgaaaaatctagtgcaatctcaatttatggatcgatgaaatatggggatgcatggaagactgcatatagtgatgccaagaaaaatcgtttgagcattagtgtaaaaaatcgaactggttttaattggataaaaaaaggtagaggctacatttatgaagtaactggcaatggtcaagaaaataatgctttttatacaatgaaaagtgaaaccgtatatttttataatcagaagaaaaatttaggtgtagcaagtttatctgaaatagcttcatatttaaatgaacataatcaagtaaaatctgtagaaaaattagcaactaagactactttggctgctgaagttacatctgacaaatatggggttaagggtgacgatggcctagcattagttccaacgagacttttgggtacttggtacaactataaaggaaagaagttagtaattactgatcatactgttaatggtgaagaaattcatcatatttctaattctggtgtagcagcagaatccttagatcaaacgaaaaagtgggctagagctcggatcgaaaatattaatggattaaattgctatcatgttcaaacattgaatgcccaagattttggcttactttattctgtccaaaaagataatggcaatacggcagtagtaacttatagcgttgatacaggtcattatacggctacttattggaagagcaccaagatagccaaggaacaccgaaatgcagaatttaagactttaaattaatatttgtaaagaagtattaaaataattgcaatgaacaaaaagtataatttttgtaaaataatcgtgtaagaagttggcggatcgtattttttataatactattaagcaaagagatagaattattgaaagaaaaggggattccttttgaaaagtaaattaactgttttggttgcaatttcagctgctttaactttagcaggatgtagccaaagtacacaaggtaatagtaattcacaatcacagtcagaaaaatcaagtcaagtttctaagagtaactcagaaaaaactggcacctcagaatcaagtaacagtcaaaactcagcaaaattatctgctgagaatatggactataagacgcaggctagtgcaatctctgtctatgctgcacaaaagtatggcgacacttgggaaattgcagttgatgctgccaaaaatggtaatttaggtgttgcgttcagaaccaaagccgcaacaggtattacttctgatgactcaggatatgtttatgaagtctccggtaccggtaaaagcagtaatgctcgttacatgttaagcggggatggagcacaaaagaaaattactatttttgttaagcaaagaaaccttggtactgtaactttacaagatgtagttgattacattaataaaaataatgatgttgatctagttcaaagcttggctaaaaatgccaaactagatgttaaacttgaaggcgataatgacaatgcagctggtgctaaggaatctgctagtgccgtaattccatcaagcttgcaaggtacttggtacactgcagatactggcaatggcaatatcgatactttgactgtaactgctaataagatcaatgatgaagctggttttagcatggatgtaaaggctaaaaattcaggttcatcaactagttcaggctatatgaaacaagctactattaatggaattaatttctatagttttactaatatgggtcaagaaccaggtcaaggcagtacatatttggcaccgcatactgaaaatggtcaaagtgtaattgtttcagctaactctaagggaacaactaatgctgtctactggaagagcgaagccttggctaagcaaaactccaacaagcaatttagcgatctacagtattaaaagtgaataaaatatagaattaggcgatatctttgcgatatcgccttttttgttgtgaagacgtttttataaaacttttacttacgaagaaaaaatttttctggtaaagtaatcaacgttgcagaaaaaaggaggaaaaatttaatggataatactcagagtgggggtgaaagctcgcatcatgttcaacggccttggcgtgctattcttccattaatgtttggagcattttggggatgttcagtgaaacttcgttgaatagtgaatggaagtcgttaattacttagtatttggagtggctaatactttttttgatttctgtaaaactaatttattgtcaataaattttataatataatataattttagcaactaaaaatagttgcaagaaaagaatggttaatggtaaatcacaagaagacaatagaaaagatcaaagcagaatcggtaaatataacttatatagaagcggaatctttgcttgaatggttaggctatactaaactaaataaaggcaaaacaagtggctcacgtgttaaattcattaaaggaaataagccaatatatttgcataagccacatcctagaaaaaacttgttaaaatatcaagttaaagatttaaaatctaatttacgaggtgaaatctaatgaaaaaagaattatcatacaaaggctattatggttcagtagaatattcattagaagacgatgttctctatggtaaagttattggcattaaaggactcttatcatatgaaggacaaacattagatgaattaagaaaagactttcaaggtgttatagatgaatatttggaagattgcaaggctcaagggattgtgcctcaaaagtcgtataagggttccttcaatgtaaggattacacctgaattgcatatgaaagcagctgcttatgcagctagccaagccgaatcacttaatagtttggttgaaaaagctatcaaaaaatatgtgaatgcttaagcaatgtagtttttagtggctatggtattctaaggagttgctagaaaatgccaaataaagaaatactatattttaatgatcatattgtcccttggatagaaaaagaagagtgggctaataatgagcatacagaagtcgctttaacttttaagaaaaacaccccagtagatattattaataaatttttgatttgtcgatctgaattagctattaactatactgcagattataaaattgtataggaagactccatgttgtatccatatgcagaatttcctggagaattgtcaattacatattctcaaataatggtagacgataatgtaaagggtggtaaaaagcttttggtccactttgaacaaccgacagattatggatttaaagaagccagatatgagttgcctgattataaagaaatttacaactacgactttacaccttctgaaactagaaataatctagatattcttaagagaaacgaaagtctaatttggaagtgtgccgaagaggaggaaataatgattgactaaaaggtagaatttagcagtaataaatagaaaaagatgcagctaatttgttcagaaagataaaacatagaaacaaattggttgctgctaaaaatttaatattttgttcgcttgtttttgtttcatcctttgctaaacttatgtttgcattggaggtgaaacaaatgattaaaactcaggtagctgagctaaagccaaacaagaccatgcaaagagaacttgaccgtctatgtgattaccgcagatactgctggaatctggctttagccacttggcaagacatgtatgaagcacggactttagacaaggataataatcctagtcctaatgagcgtcgagtgcgggatgaattagtcaataacaaggctgattggcagtttgccttgtctgctcgctgtctgcagttggcagtcaaggatttgtccaacgcttggaaaaatttctttgacaaggcccagcctgattggggcaagccgcatttcaagtcaaagaaagccccacgtcaaggctttaagactgatcgagctaaagttattaatggcaagctcagactggataagcccagaggaattaaatcatggtttgatattccaacatatgaagcattaaagatggaagaggttaaaattgccagcatctttagagaaagaggacattattatgcagcacttttctatgaagaagaggctggactaaaggctaaaactggcaaaaagaccgccatcgatgtcaacgttggacatttcaactacactaaaggcaagattaatgttttaccagccaaactacagaaactgtacaagcgaatcaagcattatcagagaatattggctaaaaagagacgggctaatggcaaattggctggccgaagcaataattacctgcaagtgagaaccaagcttcagcgtgattatcgcaaagtagctgatattcagaatgatcttttgcaaaaatttaccactgaacttgtaaacaattatgaccaaattgttattgagaacttgaatgtcaagcaaatgatgatgacgcatgtggcttccaaaggcatgcaaaggtcactatttggcaagttcaaacaaattttgacttacaaatgtgaatggtatggcaaaaagctgatcttggctgataaaacatatccatcaacgcaaagatgtgccaattgcggctatgtcaaaactggtgcagacaaaatcaccttgcagggcaatagaaaacatggcaccaagcacaatgaatatgtttgttatgagtgtggctatagcaatgatcgtgatgacaatgcagtattgaatttgctagcattaacaaaataaaagacaatggggctggctaagcccttaagctgcaagagttggtcaatgcgattactccctagatggaatatcggaataccaatgatgacggcagtaaataaaattaggaaaggaaaaatatatttctttctggcatgtagaaaatattaaacttctacatgtttctatgttttatatagcagaaaacaagtacctaattattttcggcttaaaaattttactatgactacaattgattttcatgactaataagaagaactcactataagtgggttcttttttaataattacaccactataatatcttaagtaaagctaaaaatgattcagttagaaaagagtaaatatgaaagtcttaaaaaagtgggattagcgttgttgtcagtgatactggcatgtgtaattatcttctgtggctattatatatatttggctctacattattatcgaattcctgataatcaaagattgaaaattaataacaatcagtctcagttattaaaagcggggcgtagctataaggcaacgacttataatgttggctttggtgcttataatcatgatttcgacttctttatggattcgggtcagttgaaggatggcaagaaactgcaggggcatcgagggacagcaatatctaaacaagcagttcttgattccactaatggtgtcattcaaacaatgaaaaagcagaaccctgacttcatgtttttccaaaaaattgatactgattcaactcgtagctttcacgttaatcaggtgaaaaaggttgaagatgattttccaaaaatggattcaacttttgctagtaatttccactctgcttttttagcggttccattgaacaatcctcatggtactgtacgttcagggctgttgagtatgagcaaatataagatggatagtgccataagaagaaaatatcctgtttctagtgggcctattgaaagatttgtcgatttagatcgttgctttgtagttatgcgttttccagtaactaatggaaaagatttggtaatgatcaattcacacatgtctgcctatgataaaggcggtaaaatgcgtaaggcacagatgaaactgatttcttctgtgatggaaaaagaatatcgacgaggtaactatgtcattgtcggcggcgactttaatcatgcgttagggaaagacatgatgactcattttgagcaccaagaagaaattcctagttgggtatccgttcttgatcaaaaaatgctgcctaaagatttcactatgattaaggcgcaaaatcgcgaaaatgttgcgactgttcgtgctacagacatgaaatatgatcctaaagttaattatatgaccatttgtgatggctttattgtgtcgaaaaacgtgcaagcaaaggcgtataacattaatactcattttgagtatgcagaccataatccggttaggttggagtttgaacttaagtagatttggacaaagtgaaaaacactggatcatgaaactgtagatttatgatttagtatttacgaaattaacttatgaggtaaaatctaatgaaaaaagaattatcatataaaggttattatagttcagtggagtattcattagaagatgatactctctacggtaaagttattggtatcaacggtcttttatcatatgaaggtcaatatggggtgaaataagatgagtaagattcaagagttcatcaagaaagatattgagagacatccagagttaaaaaagaatatgaacaagtaaaccttaatttagatgcttcagtattagttaaagatatgcgtgaaggtttgggaatgagtcaataagactaactgaagaatagttagtaaaataatgaaaagcattaaaattatatttgacttttaaaataatttagactattattttaattaacataaatattaattacttagcgatgataaggaaagtaaattgacggtccttctacagagaattatcagttggtgaaagataatgatcgacctacttttgaaaatggcctttgagcttgaagctacgaaatttttagtggcttctgggtccgccctctatagcggtaacgtatcgccagccggccgtacgcaattcaaggtggttttccataaaaataggtggtaccgcgttactgaacgccctattagatcaaaatgatctagtaaggcgtttttctttttaccgtttttagcaaaggagatttttatgagaataaataaaaaagttgtttcattcggattaatagctttaactacggcaaccttagctgcttgtggtaagcaatcagatagtaataccgtttcaaaaaagcaggttttaaattggtcagagatcacacagctttctacgcaggatccttctttggcaactgatactaccagttttcaagctcttcttaataccggggacggactataccgccttgataaaaacaataaaccgcaattatctctagctactaaggctaaaacttctaatggcgggaagacttatgatttttatcttagaaaaaccgcaaaatggtctaacggcgatccattaactgctaaggattttgtatattcttataagcgtaccgttaacccagcgactaagtctcagatggcattctatctttaccagatcaaaaacgcgcaagcaattaataagggccaaaagtctccggataccttgggtgtttctgctccttctaaatatcatttgaggattcaattaactagaccactgccttacttcaagattttattgtcgtggccattatttttcccgcaaaatcaaaaagtggtgcaaaaatatggcaagttatacggcacgcaagctaaatacacagtttcttcaggcccattcacgcttactagatggaatggtaacaacaagacttggactttaattaagaataagaattactgggatgctaaaaatgttaaattaaataaagttaatgaacaggttagcgaatcaactacgactagctataatctttttgaagcaggtaaggcagatgagactggacttactggtgagcaagttgccgcaaataagaataaagcaggctaccatgcacgtttgtcttcagcgattaaaagattggaacttaacgaaaacaaggtttcagctttcaagaatttaaaggtacgccaagcattttctttggcaattaaccgtaaacaattaacaaataatgttttaaaagacggctcaattccggccaaaggctttgttccatcaggcatgggcaataatcctaagacaggaacaccatttgaagatgatgcttacgttaagagtgcagtatcgtataatcttgctaaggctaagcaattacttcgcgaagggtataaagaatctaagactaactcaattaaaattaccttgttagtttctgatgacgatacttcaaagcaaacagctgaatttcttcaaagtaagctagatcaacttccaggtgttcaaatttctgttcaaacaattccatatactcaattgatttcacgtcaaacagctggtaattaccaagctacaattaaaaactggcaggctgtctttggcgacccaatcaacttcttggacgttttccaaaaaggatcaagttatttgaacaatggttggaataacaatcaatttaacaagctgttgaatgaatcagaaaacgtatatggcaatcaaccagtaaaacgctgggcaagattagtagaagccgagaaggtattgatgaaagaccaaggaactattccattagttcaagttgctaagccacaattattaaaaactaccgtaaagggagtttcttttaaccctacaggcgttccatacgattttaagaatgttagaattgggtagataaaaaataaagtcattgatcacttgtgtaaacaagttttcaatggctttttggttttgtctgaaaaaaataatcgattttacttaaaacaaaacctttatttaatggtaaatgtgaggagaagaaaaatgtactcagaggatatgtttacttgtgaaaagagttttaaagaaaagctgaagaacttgactgcacaaaaagatcagtttgctaaagattctgattttatcttcaatcttaaaaagatagtagatacgcgtggtgctagttaaatcgttctagacaataagccaaattataagctaaaattgcaatttccaaccggctttgaaagcctatcagactacgtgctcgattgttctcggcattgtaataggtcagaagcgaaaagtcgctttcaattgttctgcgaatagccatcaattgatgatcattgtgctttttagctcctgtcatatttttacgatatggtgtccaaagttcataacccatttgttttagctgttgatgcagtctttgcctaaatagccttcgtcgccaagaagatagtaattagatggatgggtattttccatcagttcaactgtctccctggcatcatgaactgatgcctttgttacgacataatcaagaatgtaaccgtcatcgctaacaatggcatgaactttgaaactataatagtagatctttttggttgccttatagccaatattcgcagaaccgcgaaaaatccttacgcgataattgcgaaccggctgacaaactggaacgggaaaactgtcaataatcaagaattgtccgcttaaatcaactttttgattcatttttttgcgtatctgataaatcaactggagcagctgtcgagaacggcggttaaaacgcgaatgcgatagacagccgaagcatgcgcagaaccttctttgtgattcgattccagtcttggcctgccagataggcaaagccaaaattaaactgtccgtaacttttacctggttgatgtttcgccgttgactaaattcagccggagcagataaacgataccagtaccggcaaattttgactaaatctttaaaaccaacttgtgttaggatgactaaaacgcttaagcttaaggcagttcaatcagatcagactcttttctattgaatactacaacttgagtctagtccgattggacttttttattaactaaaacgatttaactagcaccacgcgtagttgctaaataatgtacgaacgaatgataatgcaaggcatagatgtgtacattagtgagatatacataagctaaatattagaaaagggcaaaacatttcaaatagttttgcccttttgatatctattcttttgttaaattttcattttgcgcttaacttcccatttacgaagcaaaggtaaaataaatcctgtaccgaataagaatagtactactacgatattcatccataattgatgaaaccatttcggtgttccaaattgcccattctgcggaagaaatgccattgttgcacaaatgaatgttaataggaaacaccaccagcctacagccagtgcgccttttctgtttttaataaatacaaattcatttttaccaaagtgtttacgattatatcttaaaatcagaaaacatagaaatactacagcagttttgtatggtgaaacgatagtattgatattaagtaaccagttaacaaaatcgttaattttaggtaacgtaccaccaaggacaattagtactaaagtagttccagcggtaaaaatgtaactgttaattggacggccgtttttattctttttgagtagccaactaggcatgtacttaactgcagtatctgatgctaagaaacgactggcggcatcaattaaggcagcaatttgagctaatagactaaccaagcaaactatagagtatgcaagcattaagctattacccataccagcttcgcgccccaataattggaaagcaaaataatcaccattcattttgaagtcattaggaatatgctttgcatcaaataaaacagctaatccgagtgtttctagaatgaccataagggcagtaacaaaaaataggagccacatggtcttaggaaattctttttgtgggtttcgtaatcttgaaatatatggtgctgccagttctgctcctgacattgcgaaaataagcatacttgcactggagaaataatgcaggcttaaatgaggtttgatgttgttccaagttaatttagttgcaatatgtccaccatgagacaacgaccatacaatcataccaaagaatactaacgtcattactaccatggcgataccgctccataatgaagttgcatctagggcatccttaacggtattatcgaagatcaaaaataacaatatgattagaaaggttataaaactaaagaccattggcgacattttttgacttagcgatcgattgccaagaattacccaagatatggatacaactactgaactagcacaatctattaaataaggaattgtttgtgcccagtacatccaaccagtggcatatcctagtaaatcgcttcctgtaccgcgcctaatccaagaagacataccacctgcttcttcaccttcatatgcactacctaattcggtggcaatcaaagtgtagggcagctgatagaaaagaagcatgataatccataatactaagacgaatagtccatattcttgatatgggtagaatggatcttcgaaactgataactgttatgtagacaaacatggatagggttatccaacccatataatgcttttgagtgttttcctctgtcatttttactccctttaaaaactaattttgaggttggttttcaaaattagaagacgggggcttgttttgtctttttaaaaactcgtaaattgcaataataacttgaacacttttgtttaggctgtttgatagatgcgatctaattctctttcaaagatttcatctggtgtatgataagccaagatctttcttggcaatgaattgcaccaagtttcaatgtcaatgatttgttggagagagtagttatgaatatagtcacctttaggaatgaatctgcgaataaggccattatgcctctctacagtgcctttatcacaagaagtatatggatgagcataataaactagtgatttggaaatatcttccagctgagatagatccgcaaattcagaaccattatcagtcgtaatagttttaaagatatcgttccaatgctcgctgtattgcttgcgcagacttttaaaggcattcattacactggcagctgttttatctgggattttaataattaggaactcacggctcatgcgttcagacaaagttagcagcacttcgtcgtccttggtcttatggcctaaaacaagatcacattcccaatgcccaaacacatcacgcttattaacttcctgtggtcgttgttcaatactgcggcctagcttcttcttatttttacgaatgcgatgaattttggtattgcgcttgagtttctctggcaaatcatagttatggatgtttaacaagccttgatcgacataattataaagcgtcctggtgcagacaatatcgttgctggcaaattcacccacagcagtgcagcgattactgcagacatcgagtgaccagccatcttcaaagaagtgccgttgaacgtaatcaataaatttgtgctttttgagaaagtcagattttcgaccacagtgctgacgatggttttgataaacgctttggccttgctgggctttataacgtttgatattgccgtgatacagcttaacggttcctcgcttaatctcatagtgaattgtactaggggaacagccaatttctcgagcgatggaacgcaaagaacaatgatctttcaaacgagtttgaataataacccgctcttcaagcgatagatgtgttccttttttacgcttgtccatgatagaatgtagtgagtccattttgacctccatagatgtttttgtggttattaacattctatcaaacaggtccaaatggactttttattttctatcaagtgttcaatttaattttacaatcggccctttttaaaaactcaaaaaagtactgcatttttgctaaataatttttcctcctaaaggttagtcttattattacgcaaaaattatctataataaaggtatcattaatattttatggagggtaaaatgcattatctaagaatagctgctcgaaaagatttgttgccatatttgccgaaaaattggccaactactgaattaaaagagaatctaaatggtgcatatttagccgcagttgttgtccgaaaaaaggatagccgtggagtgggtatgcaaaaagtatttgctaaacaattaaagttagatttacctttgattatttgggaagataatcaagatatgataaaggaaattgatcaaaaagcgagtcagtatgaaacaaatgtaattcctgaatttcttagagacttaactaagtttgctgatcaggacgatttgattttaagtacaccaggacatcataatggtcatttctatgatcgtcatccagctggagcggtgatgaaagaattctttggtcacaacttgtttaaagcagatgtttctgatagtgtatttgaactgggagatatgatgactcatgagggtggaccattaaaagcagaagaagaagccgcaaaagcgtacaatgctgataaggtttacttttgcactaatgggacaaccagtgcaaatactatctgtgcaactgctgtattgaaaaataatgatctcgttctgtttgatcgtaataatcataaaagcttatacaacagtgcattaattatgacaggtgctaaacctgtttatttacctactgatagaaatgctgatggattaattggaccattgactaaagaaagtttaaacgaaaataaaattagagaagaaattgctaaagttgatcctgatcgagctaaagtcaaacgtccatttagaatggcagtattacagttggaaacatacgatggcgtattttacaatgcaaagtacttaattgaaaaattgggtaggctttgtgattatattctttttgattgtgcttggggaggttatgaacaatttgtagatgttttgcgcgacttgtcaccattacaactgtcttacggtccagatgatccaggtattctagtaacgcaatctattcataaacagcaagctggaattgctcaagcttctcaaattcttaaaaaggatggtcatttgaaagggcagaagcgttatgttgaccataagcacttcaatcatgcatatcttaaatatgtaaccacaagttattcttatccaatttattcttccttagttgtaaatgcgaagatggcaaattcaccagcttgcaaatcttggtgggacgatacagttaaactttcaattaaatttagaaaaagattgctaaaggaaagtaagctttttagaccgttagtgcctttaaaaattaatggtaaaaaatggcaagatatttctacagaagtgttaatgcatgataagcaagcctggaaattaagtccttctgatgattggcatggatttaataaaatcgacgataatgaagtagttttgagcccgttaaaattaacagttcttaatccaggtattgatttaagtggtgaagaatatgctgaagaagggattccaggggttattcttgaaaattatcttcacgaagaacatattattccagaaaaatctgatatatattcaacactttatttaattactcctggagaaagtaatgttgatatggagactttatttgatgcattaatgaggtttgagcatgcttatttggataaacaagcattatctgaagtgatgccacaattagttaagaaatttcctgatcgctataaaggatatactctttaccagctttgtcaggaaatgcatcaatattataagcagaatcatatctttgagcttgaaagagatttgtttcttaagacaacctttcaagattatgtaatgaagcctggccaagctgatttcgactttaatgaaaataaaagtcaattagtagagcttgataacttaaagggaagaatagcgctagaaggtgcattaccatacccaccaggtgtctttatcgttgcaccaggagaaaaatggcaacaaattgatattgattatttcaaaattttacttggcgcggcagctactttccctggttttgagccagaagttcaaggtgtttataaagattcgggtaaaattgttggagaggtattaaggaaataagaaaatatacttctattttgaataagcattattttatgttggttttaatctctaattgagttattttaaaatgtttttgctagaaaaaaggcactattatatcggcagatgagtaaattaactactgaaactgaattaagatttaacgtaaagactgttagtgttgaagacatgaccaacatgcttgaagatttaggttggaaagaaaactaagagtcaaaataagaaaaattctaactacgatgcagtagtaaagtcacatcgcaatatcgatcaactaagaaagccagtgtaggtaagttaacctatgctggtttttggtttactaatattttagctaataatttgcacatgatttattgcttccaaaggcaactttgatcctgatacaataattgtttcttgatcgtaataaccttccacaaagcctttaatatcaggtgataaattaccattttcatctaggtcttttagttgaagtgagatcagtctatgattacaaaaggaatctagcagaatttcactaattttatcgactgtcatttcagactttttaaaataattagtatttctttcaatattgctcttgctaatttttacagtatgatcactcaaaaagaaaccagaccatttcttcatgccagaatcctgataattacgaaagaactcatctagtttttggtcgaatgcatttttattcataagcattaccaccattatgtccaccaactaatttgctacgctgaatagctgttgcacctttggatagactggatgctttaactactgccgaaaagccgtactttttacgcaatttgtctactacatggtcaagcttgtatcttttgatctgtagttctggatcttccaggatatttaactgcatactgtggtcgggaactagctcgctatagctaacgccaatacggcgtacagcttcacctcgccaattttttctaaaaatagctagtaaagtttgtacaagttcatgattaacattagttggagtgatttttctttgaacattaaaaccatcgcgatcattatcataatctagttctgaaagggagaagccgatataaagactaaccttgcctgcacacaaattatgtgctcgaattctagctccgacttgttcgccgatttctcgaatgacaatttcgatttctcgttgctgagaatagtctctttgtaaaacttgtgagttgccatagcttttagtttttgggtgatacttatgactgataatactacgatcaacaccccagctttctgcaaatagctgctcaccaataataccaaattctttcttgagaatggctggatcagtgtgcgccagttggtagacattattaatgccaattctacgtaaatgattagcagtgcgagtattaatgccccaaacgtcttctaattttggaatacgccagatcgtatctggaacatcgatgtaatgccagaaggcaaccatagatttattgtgcttagcctcattgtccatggcgagtttagctaataagggattttcgccaataccacaagttgtataaagtcctagagtatcatggatatctttttgaattttatgagcaacattatatggatcattaccaaatagtttccaagaggttgtcatatcaatcatgccttcatcgattgagtacatatgaatatcttcatcagctgcatatttacgaaaaatatcgagtacctgcatgctgcgtttgatataaagattcatatgtggatcaactagcattaagtctggtgcttcttttttagagggtaagtttctagctctcatgacattgtgtaggttatattttttcttagctagaggagaagcagccataatcaagcctgatccccagggagcatctggctgtcttgaaataaccactaggcaagctttcataggattaaggcctaatcgtagggcttcgcatgatgcgaaaaagcttttgttatcaatcataaaaataatacgatgaggttcgtacttgaaatcatacataataccgtccgcctttagtaaactgcacgaactaacgtgcgcacgtttatattatataaacttttgttcgtgcgaacaagtgggcattttattttttaattataaattgagcggcgaaactataaaatgattcgtgtaaaaaataaatacatttttatttgactatttggaacgttccaattacaatgtaattagttgtttaagaaagcggttacaaaaatgaggaatgattatgaataaaattattaaaggagacacatatcgctttacagttattactgattcattaataagaatcgaacaagataatagtggtatatttgaagatcaccctacaacggctgtattacatagaaattttaaaaaggttaatgcagagatattaaaaaatcataataatcacattgttgagatcataactgatgcttttcatttgtattatgatggtggcacattcgctcctgatactttatatgcagatatcaaagtatcacaagcattacatgtaagcagatggcattttggtactgagaatgcagaaggtactaacaacctaaagggaactgctagaactttggatagagcagatggtgagattcctttagagaatgggattatgtctaaggatggatatagctatttcgatgattctagttcgtttatttatgataagaagaacgataagtattatccaagaagcaatgattcagtagatggatacctatttacttatgggcatgcatatcaggaagaacttcaagatttttatgagttaactggtaaaacgcctttaattccaagattcgcattaggaagttggtggagcagatatcatccgtatactcaggaagagtacaaaaaattagtagaaacatttgaacaaaagaagattccaattagtgtatcagttattgatactgattggcatagggaagatgacgttcctgctaaatatggttcaccatggactggttttacttggaacaaaaatctgtttccggatcatattaagtttttaagttggcttcatcaacataacataataagcacattggattaaatattcatccggctgatggcattagagcttttgaagatcaatacccagtggttgctaaagacatgaatttggatactgaatcggaagaacctgctgcttttgatctagaaaacaaacagtttagaggagcttacttcaaagatgtattacacccactagaaaatgaaggaattgacttttggtggattgattggcaacaaggctatagcttatctgataagaagttagatcctttgtggttacttaatcactatcaatttgaggatattgctaagcgcaagccggatgaggtaattattttaagtcgatacgctggtgtaggatctcacagatatccactaggattttcaggagatacagttatttcttggaaatcattagcctttcagccatattttacttctacagcttcaaacattggctacacgtggtggagtcatgatattggtggtcatatgatgggtgaatctgatggtgagctaactactaggtggttacaattcggggtatttagtccaataacaagacttcattcttcaaataatttattctctggtaaagagccatggaactttagaatggattatgaaaaatatcaagaaaaattccttcgtttacgttctaagctagttccgtatattgatactgctaattatcaaactcatgaaaatggtattccagttgtaaagccactttattatgactatccagagtcggatgaagcgtatgaaaataaaaatgaatatttatttggatcagaaatgttagtgtcgccagtaactaggccacatgataaggcgacacaagaggcttacagtactacctggttacctaaaggagaatgggtagattacttcaaccatcttttgtataagggtgatacaactattaaaacttatcgagattgtagtcaactccctgtttttgttaagaaaggaagcttgattgtaactaatcctgactatatggaagatattgacaaattacctgaaacattagatgttgaaatctttccaggtaagaatagtagttattgtctagttgagcatataaaaaataaagtagctaaaacaacatttgaatggaataatcaaactcgtattttaacgattaatgttgatgatccagcagatattatccctgaaagcagacagattcatcaaaaaataattaattatcaaaagtcagatgtaattaaagaagcgtatcgaagacttcaaacggcacaaactagttttgagctgaaacagaagctttacttagcattttcttcagataaatatcaatacgctaattttatcaatatgttaaacaacattaatgatgagaatctaagaaacagtttaagtgaattagcatattccagagaggcatatcatgagtagaaaacctactatgaatgatgtggctaaactcgctgaagtaggaagaggcacagtttctaattatattaacggtcaaaaagtaaaagaggaaaatagattaaaaattcaaaaggctattgatgagttaggatatgtacctaacttacaggctaaagaattaagaacatcgataaatactgaggttgtatttattgttccaactaattggacgccattcttttctgaaatgattttttatatgcaaaaacatctcgggcgatttggctataagatgattttggagaattcacatagtagtcccgaagaagaaaaagatattttacaaatggctgctttgaatcaggtggcaggtgtaattactatgtcttattctgatctttataattttatagattttaaaaagaaactgaacttggtatctatagagcgatttgtcgcaccggaggtgccattaataagcagtgacaataaagcaggtggtagattagcagcaaaaaaacttattgacttaaacttcccacactaaataagccagtaatctcttgatcttgcttggctttaggcttctatattatttttgctagttttctttaacaatttttgcatgtatttgggtaaacgattgataaagtcagccgtgaattcagctatttgtgcttcactggcatgaaagacttgctttacgctggccagcattgcatcagtaatcaattgcaaggaatggctaaaagtaatgtccgccagctcatcaatcatgcaatagaacagctcgcctagcgtgcgttcatcttcatcgtcccgcttggcaactgacataagcatgtagcgagtaaaaactatggcaacatgagcggtcaaagcatcgtaagacaggccatgatattccgtacttagttttagataatttttgcaagttttgaaaaaaacctcaatatcccaacgcttgccgtagttgcggataatttcatcttcgctaagcgacatgtcggtacaaatgattgccagccaatccttgcgattggcacggtttctaacgcagacaatccgtgcatctattttagcaccgtctttgtcctggcgtccgactttgactgggattgacagcaggtagcgagaacggccgcatcgctttttacagctgcgataaatctgtttgatgtttttgcgttctccctcaaattcatatttgattttggagctaaccttaaccatggcaatcacatccagcttcctttgcttgagctggacgatttgatgtggatttgagaaccagctgtcaaacagcacgtacttggcttgatgacctgctttcatagcttggtcgattaaattaaccatcacgtctgtgcctttagtccgggcaagcatacgtctttggccagcaatggtgcgctgatcaaaaactttattttcgccaatcatattctgtagcttctgagaagacagcagcactgaattgattggcatgaaagaagctccatcagtccagcccagggtcatcatgcgaaaacctttcttgtaagtcattgatacatggtcaaaaactttggcgactaattctgttttcttgaagccggtcctagagaagtaggaatcatcgacaacaaagcaatcagcccgtttttctgaagtcaaagatcgcaagtggttattaatgatttgcgcagacagaagtgtggtgaagtggagccaattgacgtgaacgttgcgcataaaacggtaatatgagttcttggaaaaattttcttgaaaatgatccattttcagctgcatatataagctgcggtcacgaaagacattgcttaaaacgtaaagaaacaagctgaacaggctaatgcctttttccttgcggaagccacattttctcaacagcttgatcacctgaaacttcttgatgaagctgatgattgagtttgaaaatagttggtcaggagatggtaaaatagacattggcacaagcctttcatgcaaataaattatgttttggtcaatataattatagcaatgaaaaggacttgtgccttttatatttgtcaaaacacgcagaatcacaatgaaacaagcaattttgcgtgtgggaagtttaagttattgaaatgaaaaagaaaaatatccttttaattagacgagatgtgcatcattataatgcaacagatattagagcaaaagtatttaaggaatacatgcggggtaaaaaagttaaagtagatgagttttctgcttcgcttaaagatacatatcggcaagagattgtggagttcttaaaacaaaaactaacttctaagcagtatgatggtatttttgccgtgaccgatgaatacgctctggttgctaaagaagcaataggtgtgattcagcctgatttgctaaaagaaatcgaaattattggttttgatggagcaagggggtctaaagaatcaagaataaaagtagatagtattcaacagccaattgaggatattgttaaagaagcagtgtccgttcttattcgaaaaattaaaggggaagaaataggtaataactacaaaaaaatactacctgtttcatttgtaaaagctgaaaagctaatgggagaataaatcatgaaattatggaaaaaagtgttgatgtgtagttcagttgttttagctgggttaactttaggtgcatgtagcaacgataatagtaattcaacttcatccaatgataataagaagcctattacgttgtgggttgctactgattatgttccttggtataagacttcagttaaacaatttgaaaagaagtatccgcaatataaagttaaagttgctcaaagtcctaatggtacggcaaacgctaaaactgatgttggtaaggatccaactaaggctgccgatgtattcgctgttccaaacgatcagttaggatccatggctgatgcaggatacattaacccattatctcctaaagatgtagcaaacattaagaagaatgatactgctgtagcatataaggcatctcaatggaaaggtaagttgtacggctatccatacactgcagatgtgcaattcttgtattacaacaagtcaaaattatcagcttcagatgttaaagattgggatactttaaccaaaaaaggagtagttgcaactgatttctctaatgcgtataacatttggccagtaatgttttcagcaggtacaaagctgtttggtgacagtggtgaagacctaaaaggttcaacaatggatagccaaaatggtgttaatggtttgaagtgggttgcagaacaaaagaataataaaggcgtaatgcaaaccactaatgcattgaaccagttaaaacttaatcatgcgcaagccatcttagatgggccatgggacgcacaaaatgttagaaagattctaggaaagaattttgcagttgctccatatccaacaattactattaatgggcacaagaagcaaatgcaggcattcttaggaattggttgttttggtgtcaactctcatacaaagaatgttaaagcagctaatgcattagctgaatttttaactagcaaagaacaacaattgattgtacacactaagacaggtgagactcctgtaaataaggctgcacaagctacagcagccgttaaaaatgataaagtcgctgatgctgttatgactatgtcaaagcctggttattcagtaattatgccaaagatgccacaaattacgacattctggaatgaatcagctccacttcttagcggtgtctatgatcataaagttaaacctgcacaatatagagctaagttggctaaattacaaaaagatatttcaaagaaataaatattttatttaatttaagtcatttctataaacagtattaataaaagcattttagaaaagtcaataaatcaacaatttaatgacattgttgattgttggcttttttgttattttagtaaaattaaaaaaatataaaataaatattgcttatataaaaaatagatgatattatttgttaaatttctttaacgagatttaataaaacttacaaaattagataggggatgcaagtatgagcaatttaacaaatccaaatgatcataaagatctgtcgtttttatttaaatcagtggatcgattggcagctttagaaacacaaaagaaggccgatacgattattagtgttcgcaagaagtgggtagctgccgcaatgattgctcttgcttctggatctaccgttttattaactagcaatactgctaatgctgcaacttcagatgttaactctgaagtgcaggtaacagcacaaaatcaaaacacaacagagaataagatgcaagctggagatacagctaatagccatgatactgaacaaaatgttacagtgcaggctaattcatctcaacaaagtaatcaagaagctaatacagctgatcaaaacaatacgccagagaatgataatcaagtacaaacaccaaccaatcaggctgatcatgttaaagggaatgttcaatctgcatgggaccagggatataaaggtcaaggtactgtcgtagctgttattgactcaggagctgatccaagccataaggattttcaaacaatgcctgaaaatcctaagctttcaaaggatgatattcaaaaaaagattgaacagcaggggtatgggaagtacgtaaatgaaaagttcccatatgtttataactatgccgatagagacaatgattacattacttctgatgacactaactcaaatgattctcctcacggtcaacacgtttcaggtatcattgctgctgatggaaaaccagatggtaataaagaatacgttgtcggtgttgctccagaagctcaattgatgcaattgcgtgttttcggtcagttttcagatgaaaaaactgatgatgttgctaaggctatttacgatgctactaatttaggtgcggatgtaattcaaatgtcccttggtcaaggtgttgcagatcagcaattaactaatattgaacaaaaagctgttcaatatgcaattgatcatggtgtgtttgtttcaatttctgcatcaaataatggtcattcaggttcagttgataatacaagtaatgtgacttctgtagaaagttatgaatctggaagtgcagatggtaattatgaaccacttaattcaagtacagtggctaatcctggtgcttctaaaaatgcattaacagttgctgcagagacttcagctactggtaaagatagtgacatggctggattttcatcttggggaccggtacaagactttactttaaaacctgatttggctgctccagggtatcaagttgtttctaccgtcaacaataataattaccaaacaatgagtggaacctcaatggctggtccattcgcagcagcaagtgctgcactggtaatgcaacggctaaagaaaactaatcctgaattaaaaggagcgcagttggttgctgctactaaagctcttttaatgaacagtgctaaacctcaaacgcaaaatgggtatactacacctgtttctccacgtagacagggtgccggacaaatcgatgttggtgctgcgacttcgaatccagtttatgtaattactgatgatggaacaagttcagtctcacttcatcaagttaaagaaaacactccatttactttaactttccataatctaacagatcaagaacaagtttatacttttgatgattttggtggtgggtatactgagcaaagggatagcgatactggagtttatcatgatgttcaattagcgggtgcacgtgtttatggtgaaaactcatttagtttagctcctaaagaaactaaacaggttacgtattctttaaatctaaatggcttaaacaacaatcaattagtagaaggttttttaagatttaccaatactaatgataaatctacagtttcagtaccatatttagcttactatggtgacttaaccagtgaaaatgtttttgatcaaaatgctaatgaagaacaccccgacatccagggaaatcgattcgttaatgaacaaaattatcctcgtggtgttgctgatcaagaatcattaaagcaacttgttaatgtagaaggcgattacaactggcaagaagttgcaaaattgtatgaaagcggaaaggtagccttctcaccaaataacgataataagagtgatcttcttaaaccatatacttatttgaaacaaaatgttaaggatttaaaagctgtggtccttgacgctcaaggtaatgtcgtaagagttgttgcagatgtgcaaggtgtagataagtcttatgatgaaaacggagtaactaaagatacaagcttatcagtttcaatgagagataatcctgatgcgtttgaatgggacggcaaggtatataatagtaaaactggtcaaatggaagttgctaaagatggtaattatacttatagattagtagctacactttggaatgaaggacctcatcaagtgcaaactgcagatttccctgtagtaattgatactgttgcaccaacattgtctaatgtgaaatatgatgaagccacgaatactttaagcggtgaataccaagatactggggctggctttactaattattcatatgcgacagttacagttaacgataaagtcttcggctataaacttagtgatagccagtcggcttttgacaatgctgaaaagacaaaaggacatttcagttttactttggacaagaatgcggttgctgcgttatcaaacgctgaaaataaggtaagtgttgccttgagtgatgtggctgataatactgcagtttacagtgttgatgtagcaggaaaagatattaatgaacctgcagttagtgtttggaatgctactaatggattagcatttgatcaaaattctactagttacaataaggatactaagacttacacgttaattggtggagcaaatcaagatttctatttgaatggtaaattagttcaggttcaaaatggtcagtattctgttcctgttgatgtcaattcaactaacttggtatttagcactgatgctactggtaaaaatgtgttaaagaatttctcaactgtaactccaaaagcattctttaattggcaagttactgacacttttgcaggtaactctggtgtttcaatcaactctgttgaaactaatcgaaaagatgatgtagttgttcaagctgctgtacctaaaggtgaaaatgtccaagcttttgctaaagattactttacaggtgaattatatacaggtgaagttaatgatggggtagctacattccatgtacatacttcaattaatggtggcaagcgtgcattattaactggttggactgttgttaatggaccatcttacaatgataagcaagaaactagtcaaagaggcgtagcaagttcaaatcacctaggtgtttactatgaagtagatgcagctgatcgtccagtttatactaaccgtaatcagttaggtgttgaagtaaaagacgaggcagcaaatgtggatgcatttggtccaggagcatatccaggacatgccccatctgatttgacgactagaacagctcctaatccaaacattcattttgattatatgaatgataatgatactactcgttttggtcaaaacgcagtattaaagggttactatgatcccactacaatgaagtttacggtaactggtaatgtagacgataatgtaactagcttaactgtcttgagtgatagttccaatgaaaatgaccctgcaaatcaagttaaactagatcaaaatggtaagtttagctttgccgtgactgcaaatagtactggtcaacgtccaattgcttatctttataggacgaaggacggtcaaactgttcgtggtacattaaatcttatcttagacacagtaaaaccaactcttgaagtcaaccaagttaatggtaatgaacttgagctttggactaataatcctaaatttgttttatcaggtaaggtaaatgataacttggatggttatagactctacgttaatggtaataacatttatcgtgaattcttaaactcaggttataatcgtttagaaggtttgaatactgatacagagttgacaaatccatatggcgatcatgaatttgagcaagttgaaaatcttaacgataataatgatcaaccgactactcatatctttactgttaatgtagtagatcaggctggaaataccgtcaccaagaagctaactgtgcattttgatcctaactatgttgtacctacagacaatacagatgtagtagttgacactagcacgagtgacacagatggagttactgaaacaaaaccaattgatcctttagtaggtaaatcatttaaattattgcataatgcatatctttatgatcaaaatggtgaagttgttttgactgatgttgagaatgctaagagcttgctcaaaaaaggacagacaatcgttgcattggataatgctaaagtaacatttatcaatggcgttaagttttatagagtaggcaacaatacttttgttaaaacggcaaatactgttcttcaagcacctaagagactcaagctgactcacaatgcttatgtttacgatcaaaaaggtaatgttgtcaaaaagcatggcaagaaagttttacttaagaagaatcaatggattagtgcattgaacaatgcagataaatatgtaatcaagggtaggttatattacaaattagctgatggtcaatttgtaaaagtggctaatactgttactaaaaaagctaagttacgaaaaactgtagtgagttagaaatacagataaatagtcaagtattgtaattttgcaatgcttgactatttttgtgcttgtagtttgttttgaattttcttctgtctatgacgaataagcttaacgatttcaaagtacattttttggagaataacatattagcacataagcctaagtgtataattttttacggtaagttgaataaataattaaaaaagcccaagtcctttgaatttggacttgagctcaaacaaaaagaccagtagtctgatgttaagaacaaaaaacacattagaagctggtcttttatgaattcaattgtaactgaaatcgcaaatattataaagtctgaagataattatattaagcgtgaaagaaaaataatctgtttcttcttaaacctgattaaggaaatcatggccttggctttagctaaagttgatgatgaaatgattaccaaggttaaagcacagggctatcagattgataagaagaatgagcgctcaatcaatatggcttttggcgaagttaggtatgtcagaagaagatatgtctgcccaggcaaacaagcaaggtatcccttggatgaattaatgggctttgacaaatacaagcgctacagtattttagcagtcaaaaacatcttagaagtaagcagcgttgccacttatcgcaatactgctctagcagtcaattgcctgtctggctttaatattagccatatgcaggtgggcaatttggtaaaaatggccgggaaaaatattaaagcgggccaagaagcagattcaagatatgatgccgcaggcactaagaaaaaggtcccagttttgtatcttgaaggcgatggcgtggtgatcaaaggcactaaaagccggttggaatttcatcgctatcaggtctgtgaaggcattgtcaatataagcaagaaacgcagaaagcgaatcaatgccaaggaatttgtttctttaagccgacttgatgcgctgaacgaagccaaggagtacctggccaatacttatgatctttctgatactgtaattcttagcaacgccgatggcggtgctggatatgccaaaacagacttcgatgacattgtagggctatgcaagcgtcatgagcatttcttggatgtctttcacctaaataagaaaatcaaagaaaggctatattttgcgcctgacctgcaaggcaagctgatttctgctttggaatacaaatacagctatgacaaagttaaaactatcctaaccactgcagaaagccgactaattgatgaattgaataccgagctcaatcatgattatctggggcgcctaaggaattatattgatcgtcattgggacgatattaagccgtttaagaaacgaaaactgactgtgactaaagccattggctgctgcgagagcaaccaccgcaagtatacctaccgtgttaaggggcaaggcaagaaatggtcaaaatctggagcagaaggcatgcttaggatcttaagctgcatcaagaatcgagagctggaattttggcttagcagcgagtttgaagattcagaaataactgtattgactgaacaggaattaaaagcagcggcccgtgacagcttaaagaagcgtcatgaagttcatttaggcatccagcatggcgcattaaccgcacaggtagctggcaatagttatttaagcaagctaagcagaaatttaagtcatataaatatttaagaaattaaggttagactaatggtttaaaggctaccgcaaaaacattgacacttaccacataagcgagaaactagactaatgagaagaatttagttataatatttatgtaaacggtttctgcaaaaatagattaaaaatctaaacatagaaagaaggaaacttgatgaagaaaattattaatgatccgcacgatgttgtgccagaaatggttaacggaatgactagatcatatccgcaatatattgaaaaaatcgaaggaactgaagctgtcgttcgcgcagataaagcatcaatgaaagatagagtcggaattatcagtggtggcggatcaggtcatgaacccactcatgctggttttgtcggtgaagggatgctcagtgcagctgtttgcggtcaggtctttacttcacctacgccagatcaaatatatgcagctattaaagctgttaaccagggtaaaggcgttttcatggttgttaaaaattattcaggtgatgtcatgaactttgacatggctaaggatttagcaagtatggataatattcctgttaaatcaattgtagttgacgacgatattgccgttgaaaatagcctttatactcaaggaagacgtggagtagctggaacgatcttcatgcataagattcttggtgcagctgctgaacagggagctagtcttgacgagattgaagctttagctaaaaaagttttaccaaatatcaagacgattgctgtagctctttctgcagcaactaatccagaagttggtaaacccggctttatcctgaaagaggatgaaattgagtatggtgttggcattcatagtgagccgggctatcgtcgtgaaaaaattaagccttcaaaagaattagttgatgaattaattggtaaattgaacgatgaaatgcatcttgatagtagcaagaaatacgcttgtttaattaacggcatgggtactactccattaatggaacaatatatttttgcaaacgatgtcttaaataaattagaaacttttgatattgaacctagttttatgaaggtcggtaattatatgacttcaattgatatggccggtatttcacttacgctttttgaaattcaggatgataaatggctagattacttgaattatccagttaaaacaattgcttggtagaaaggaaaaacaatggcattaactactgatacactaactatttggatgaataagttcgctgacaaggttaatacaaataaacaatatttaagtgatcttgatacgccaattggtgatggagatcatggctttaatatggatcgcgggatgaccgcagttaaagaaaaattagctactaaaccagctgatttaacttctggttttaagacgattgccatggcgttaatttcaacagttggtggtgcatctggcccgttgtatggaacggcttttctagaaatggccaagaagagtgcctcaactgatgatattggtgagttatttgatgctgcgctagctggaattgaaatgcgtggtggcgctaaaccaggcgataagaccatggtagatgtctggaacactttagtaccagaggttaagagtggcaatttaactgaagaaaaaatcaaagatgctgttgaggctactaaggatatgattgctaaaaaaggtagagcgtcatatttaggtgaacggtctaagggacacattgatcctggttctcaatcaagtgggtatctttttgaagcaatgcttgagacggagggcttgctatgagcttaggtataactttggtttctcatgtaccagacattgctaacggattacctaaattgcttaatcaagtagcaaaggatgtgccgattactgccgcaggtggtacaaacgacaatgatattggcactagcatggaaaagattatgacggcatttaatgaaaattctgccgatgaaattctagctttttacgatttaggcagtgcaaaaatgaaccttgaaatggccatggaaatgactgataaaaaagttcatctctatgatgctgcttttattgagggagcttatacagctgcatcacttattcaagcaggcgtaggcttagacgatattgaaaagcaacttaaaccgctgattattaaagattaatagaaagagggcattatgtcaggattcataggagagttctttggaactttagtcttaattgttttgggcactggttgtggtgcagcaattaatttgcaaaaatcgtatgctaaaggcgctagctggctttatgtaactattgcttggggcatggccgttacattcggtgtttatgttgctgccagtcttggctcacaggggcacttgaatcccgcggttaccattggctttgctagttttggctttttcccatggagtgaagttgggccatacttgttgggtcaattcttgggtgcctttgtcggtgctgctttagtcgcaattcaattttatcctcactttaaggctactaagacgcctgaagaaggaaacaatgtcggcatttttgcgactgcaccagccattaagaataatattttcaatttcttaagtgaaacgattgctacttttatctttgtctttgctttactcaacttaggcgattttgataaaggattaaagccaattgcagttggactgttaattatggttgttggtcaggctcttggtagcacgaccggattcgcattaaaccctgctcgtgactggtcaccaagattggcatacacaattttgccgattccaaataaatcatcagctaattggggctatgcatgggtaccgatggttggaccaattgtcggtggtgttttagcagctggcttgcaagcagttctaaaataaaaaattttaaataatacttgaagggcggacatttttatagtgtttgtccttttttcgacttctaaaaaaatttgcgccttttttgcgtaataaataatagagggttaaacatcctcaaaaatattttttaggaggactttgcatgagcaaagataaaaaactaaacgtcgcggaagtactgggctttactgatgatctgatgtttcagaacgtcatgaaagatccagagatttgtcgcatgttcttgaatgaggtgctgccacacttggacgttaaggacttaaccgtccgcacgcaggaaaggatcgcattcaatggctggggaaggtttcgattcttgatgttttgatcaccgatagccggggcaggcgctacaacgttgagatgcaggttgccaacaaaagagacatggataagcgcgccagacagtatctatttaagctaatggaggacggctttttgcggcgaagacaagaatatgaagaattgcatgcggcttatgtgatctttatcttgccgtttgacccaaaaggaaaaggcttgaagcggtatagttttgtttatactgccaaagaagacccatcagttgaactaaatgatggatctgagataatatacttaaacaccaagggagccaaaggtaaagtgaaaccaggtcttgacgatctttatcgcttgattgaaggcaagccaacttcaaatggtaagttcattagccgagttaaggagacaatgaataattatcgcagaaccgaagaatggaggaaacacgtcatgaacacggaagaagtcgcagaagcagcaaagcagctcggaatggaagaaggcaagaaagaaggcctgatcaccggagtgcaaaacttgatttctgttttgcgtgattatggtgaagacaatcaaaatattttacaacagcttaagcaaaagtatggcaatactttctccgataagcagttagaggatttcttgaagcaaagctaatcttctaataaaccaaaatagcgatagtaccaacgattgcggtactatcgcttttttgaaattaaaaaccttttaaaatggagagacattttgcttgaattttgtttggcataaaatcctcacgaatccctaaagtagagtagcaataaatctgctggctgggtattaatggaatagattttactccgggatagtttttggcagctatatccattaagaaaccaacacccatattttgtttgattagttgcaaagtagcatcgatactatcaacaactagttttttctttggtttaaaatttgtgttagtaaaaatttgttccagggcagttctagatagaaaacgtttatgtctcataattaaaggaatatctgcaatttgaaatagatcaatttctttttgctttgcgagcggattattgctgggaacaacgagattgtattggaaggtttcaagtgtggttaatttaattccagggagtttttcattgtcaagacgagaaaaaacaatggcatcatatcttccttcacgaagatgttgttctaaataatgagaattttcttcatgcgtttcaactgaagctagcaaatgtccttggttaagttgagtgatgacggaagctagccattctttaccagctaactcagaatagcctaaacgaaaactgttttcgtttgctcttttggcttctaaaataattgatcgttctttctgaattagcccttttgcgttacggtatacaactaagccagcgggtgatatagtcattcttttgtgattgtgggcctgaaaaattagttgggtaccaatttctttttcaagtcgcttaaccattgaagaaatagctggttgagttactccgaaaaattcagctgttctattatagtttttagtttctacaagtttttgaaaatactttaaatctctgaattccatttttaaataaatatctattattggatatataaattaaccgttcacaaatacattatagattatagcattaactaaactccataaatataatttatcgaaatatatatatcgcttatcatcaattcacaaaaatataaatttgattattttagattacttttcacatgtctaaagctctatgaattaagacaaaaaggttattttgtgaaaaagcgcttacaaaataatgcttgcactttagtttttcacatgatatttaatacacgacaagttgatttttatgggagatcaaaaaatgaaaaatgtaaaaaatattaagtggaatgcaagttatgatgtattggttttaggctttggcggagcaggcggtactgctgctagatttgcagcagacaataatgctcatgttctgttagttgatgtagctccttatggacatgagggtggtaatactagatattctgctcaacatgtagccatggctcatgatcgtgaaaagattggtaagtactttgatcaattggcagaaccatattcatattcaaagaagaccatggatgtttatctagacggttttgtaaatatgcccgaatactttgaaaaatattttggtattaagccatttatttggggtgatgacttccgagaaggtgatgccctagatcacaaggatcacttatgtgaatacccagaatttgaaggttcagatacttttgactttgctttagtgcataaccgcgactttgacgctggtctatggaaaaagattcgtaaggaagtagcagatcgtaaagataaaatcgatgtatggcttaattctcgcgctttagaactgattcaagacccagagactgatcaagttgtaggtgcaatagttgaacgtaatcataagagatactttatccatgctaaaaacggtgtagttgtttcaactggtggttttgaaaataatccacaaatgcaacaagattacttacatattcacaagttgaccccacttggtactttatataaccgtggcgatggtgtaaagatggtccaaagcgttggtgcaaagatgtggcatatgagcaactacgaatcacttggaattatcccaagctacgtgatcgctgaagaagagggcactcgtggtcgtcagatcgggggctggaagaatgttaagtctggttcagttattgctgttgctaatgatggttcaagatttatgaaagaagatgctaagttccgtcacggtcacatttatgatcatggcgaatacaacatgcctcatgcttttgacaatgcatggttagtctttgaccaaaaacaataccaaaaatttgttgaagaaaaagaaagcggtaagcttcgttacaacaagttatttgataagatgattaatgctactagcgtttctgaattagctgataagatgaatgttccggctaaaaacttgactgctacaataaaccaattcaatgaatttgctaaaaatggtaaggatcttgaatttggtcgtgccacagactcgatggatgaaatcagtactaacaaactttatgctctcaaattagctccagccgttttgaacactcagggtggtgcagaacataacgaaaaagctgaaatattgaataacaatgatcaaccaattcctcacctatacagtgctggtgaaatgggcggtatgtgtgtcaatcgttatcaaggtggcggtaatctcgctgaatgcttgattttcggtaagattgctggtgagcaagcagctaagatgaagtcggatacacaagaagttaaactagaaaatgctgtgccatcggttaatgatttaatagctggggataaaattgacaatatagaactaggtccagatcaatatgttggttctaccgaggctggtattggtggtcgaattgtggttagagttacttacaaagataaaaagattaagaatgttgaagtgcttgaaaatcatgaaactgagggaattggagcagtagctattcaaaaattacctgatgaaattgttaaggctaatagtacggaaattgatgcagtctcaggtgcttcaacgactactagagcagttgaagaggcggttaataaagcaattaagaaggccaaatagctaattttcacgaaaatgtcttagaatatcaataccttttttctgatagtcatttggaataaagctcttccgcatagcaatttgcatataagcccataacctttgatctggtatcaagtgaataatatgcaaatctcttctatctttaagtgtatcttccattgctaaagcaatacctacattttgactaactaagtcgatcattagttgcatagttctagctgtaaaaattatttttggagaaaaattacctaattttgcttcttgatctaagcattctctggtcagatatccttctgaacgcgcaataaagtcacgctgtgacagctcagaaattttaacttgctctttattagcccaaggatcattaagactagttattatgaccaattctgttttatttaaattgcgaatatagtaattagggtcgttaataggcaccatccaagaatagatagctacatcaatatctccattggttagactttcgaatatatctgctgatcgctctagatgcgtgtcaagcattgacattatgttagcctgatgaaattgagcgataacctcaggaatatacatgctaccagcaacaccagaaaaagagattcgtattttcttctcactggcatgcattacatcataattaacgctattaatttcatgtagaagcttaactgatttattgtaaagcaagtctccagcagttgttgtgttgagtttgccttttcggttaacctgttcaactaaaggatctttaaaatgcttagctagacgtttaacagctgctgagatcgttggttgagtaacgttaaaaaatgtagctgttttagtgtaactaccagtttctattaatttgcaaaaatacattaagtcttgattattcatcataaactccatttataaatatattttatatattgatcttttttgattataagttatgaacttcacaatcattataaaacttattatattgagatttaaagcaaaaaaataaatcattttattcacaaattcaaattagcatttaacgaaataatgttataaattgtaatcatcaacaaaagataagcgcttacaaagtttgattaataatttagggagtagaaaaatgttagataaatttcaatggaagaaatggattcttcctttagtaattggaattgtactgtggcttgtaacaccatttaagccaacagatattagtgtgccagcttggcatttatttgcaatctttgttgcaactattgcagcatgtattactaagccattaccaatgatggctaccactttaattgcagttgtgatagcaaccttaaccggtatatttaacatgaaagaagtggcggctggatttggtaattcaacctcttggatggttgctatgtgtatgtttttagcagctggatttattaaatcaggtttaggtaaaagaattgcatatatttttgttagaacttttggcaaaagcactttaggcttagcttatgctttatcatttgtagaaactgttttggcaataggtattccaagcaacaatgcacgtgttaatgggatcatgtatccaattatcgatggtctttctcgtgaaatgggttctgatcctgaaaagggaacacagagaaaattaggttctttcttagtgtttaatgaatatgaaatcaacaatgttacttccggtatgtttttaacaggtttggcaggtaacatggtagcgttaggtttggcaaaaacacaaggaattgaaatttcttggatggaatggttcctagctgctattgtccctggactgatttctttatttgttgtgccatttttattgtataaagtttatccaccagaagtaaaagagactccaaatgctcatgcttgggcagataaaaagttaacagaactaggtaaaatgacggctgctgaaaaaattatgtcagtggtctttgtagtagctattttgctctggttagtgggtccacatattggaattgatgcgactgaaactagttttattgctgtagcattacttttaattactggagtaattaataccaaagatattctaaatgaaagttttgcttggaatattttaacttggctttcagttattatgctaatgtcacaaaaattaatgactttaggctttttcccatggttctcaaaaacattgggtgcaggacttaagggcatgaattgggtattagttttagtagttttgtggttagtttacttctacttacactacttgttcccaagtgtatcaactcagatttcagctttgtatgctggttttttatcaattgctctaggtgcgggagtgccaaaaattatggcagcactaatgctagcaatgtgtggtacagtatatctttcaacttctacatattctgcgggccctgctgcaatggtttcttcaacaggatatatttctaataaggacttctggaagttaagtgcaattattggtgtggtattcaacattatctggcttggtggcggattgctttggactaaagttattggatactggtaaaaataggtgaataaaatgatatataattcttcgttaaaatgggacaaagtctatgatgtaattgttgtgggttttggtggtgccggtgcaggagccgcaagatttgcagcagataacggtgctcatgttttactagtggattcggctccagaaggtagcgaaggtggtaataccagatatgctggtggtgcttttgcctggggcagtaattttgatgatctaaaagattactacaaacaaacttattatccatttaaatacgatgaaaaagatttagatgcttttgttgagaatgttcttaagatgaaagaatattctaaaaagtattttggtattgaggcaaaagctacaggaagaagacctaagggtgaatatcctgaatatcggcatggggatgcaatgcaatcgcaaagtatgacccaagggatgtataatggcggtttctggaagctgctatgtaagaaagtttatgaaagattagatagaattgatatttggtttgattctcctgtagagcatttgattcagtcgccaaaaaatcagactattatgggcgtagtaattaatcgtaatggcaataaaagactggttgctgctaaaaatggtgtagttctaagctgcggtggttttgaaaataatcaagcgatggttcaagactttttaggtcaaggatctttggctccaataggctctttatataatcaaggcaaaggaattgatttagctgtcgaagcaggagcacgattatggcatatgtctaactatgattcgcacggtttatcattaagacagaatgacccacgtgaaaagtttgcctatatgattaattggaaatcattgtttaatggctcaatttttgtggcgggtgatgatggtacacgttatttccgtgaagatgaggaagatcgtcatggttataaatataatcatggcaattggataatgattcctaaccaaaatcatcctcatattgtaatggatcaaagacaatatgagcaattgagtaacgatacttctgcgaaggcaagtcaaataaaagaattaatttcttacgcaattaaagcaaatacgattgaagaacttgctgaaaatatatccgctcctagattaaagcaagaagttgcagactttaatttcttaactgatgtaaaaaagcgagatatgtttcttcatcgaaaaattgatactatgcgtagttttggaaaaggaccatattatgcaattcctgtaagacataatattcttcatactcatggtggagctaaaagaaatgaaaattgtgaagtaattgatttaaatggcaaagttatccctcatttatatgaggctggtgaattaggtgatatttttgctactaaatatatcggtgctaatagtattgctgacttattgatttcgggaaagatagctggcgagaatgctgctaagcccaaggatcaagaggttgaattagatgcagttactggtgcctctaaagttgctgatttgaaatccgatgctcatactatgatagccaattttgatgctggtaaaaatcagggtataggtatcagttcaaatggaataagtgatttaccgattgtagttagagtaacacttaatgataaaaatcaacttaaaaagattgaaactctacaacagaaagaatcaccatcattaggaggaaaagcaattccagttttaaccaaagcaatgattgctaacaatactactgatgtagatactgtgtccggtgcttctgttactagtcatgcctttcaagaagccgtatctgatgctttgaaacatattcaaaaataaaagttaataaaccaaaaagagcgatagtaccaatgatatagtcctactttagtagacagtacaaatatataaaattgtactatctatgaaagcaggactttttctacgtaaagtcaagcgcaataaggtgtttggctttattttttacctaaattttgtcatgagtatcttttagtggcgatttatttttttagaaagcatactaaataagcccctaagtgtataattttttacggtaagttgaataaataattaaaaaagcccaagtcctttgaatttggacttgagctcaaacaaaaagaccagtagtctgatgttaagaacaaaaaacacattagaagctggtcttttatgaattcaattgtaactgaaatcgcaaatattataaagtctgaagataattatattaagcgtgaaagaaaaataatctgtttcttcttaaacctgattaaggaaatcatggccttggctttagctaaagttgatgatgaaatgattaccaaggttaaagcacagggctatcagattgataagaagaatgagcgctcaatcaatatggcttttggcgaagttaggtatgtcagaagaagatatgtctgcccaggcaaacaagcaaggtatcccttggatgaattaatgggctttgacaaatacaagcgctacagtattttagcagtcaaaaacatcttagaagtaagcagcgttgccacttatcgcaatactgctctagcagtcaattgcctgtctggctttaatattagccatatgcaggtgggcaatttggtaaaaatggccgggaaaaatattaaagcgggccaagaagcagattcaagatatgatgccgcaggcactaagaaaaaggtcccagttttgtatcttgaaggcgatggcgtggtgatcaaaggcactaaaagccggttggaatttcatcgctatcaggtctgtgaaggcattgtcaatataagcaagaaacgcagaaagcgaatcaatgccaaggaatttgtttctttaagccgacttgatgcgctgaacgaagccaaggagtacctggccaatacttatgatctttctgatactgtaattcttagcaacgccgatggcggtgctggatatgccaaaacagacttcgatgacattgtagggctatgcaagcgtcatgagcatttcttggatgtctttcacctaaataagaaaatcaaagaaaggctatattttgcgcctgacctgcaaggcaagctgatttctgctttggaatacaaatacagctatgacaaagttaaaactatcctaaccactgcagaaagccgactaattgatgaattgaataccgagctcaatcatgattatctggggcgcctaaggaattatattgatcgtcattgggacgatattaagccgtttaagaaacgaaaactgactgtgactaaagccattggctgctgcgagagcaaccaccgcaagtatacctaccgtgttaaggggcaaggcaagaaatggtcaaaatctggagcagaaggcatgcttaggatcttaagctgcatcaagaatcgagagctggaattttggcttagcagcgagtttgaagattcagaaataactgtattgactgaacaggaattaaaagcagcggcccgtgacagcttaaagaagcgtcatgaagttcatttaggcatccagcatggcgcattaaccgcacaggtagctggcaatagttatttaagcaagctaagcagaaatttaagtcatataaatatttaagaaattaaggttagactaatggtttaaaggctaccgcaaaaacattgacacttacaataagcccacctctatatttaatttatgggcttagcgttataatgtacttgatcaattaattacgactaaagtctttttggttatgtgtggctacgttgtaatcatatagttgatcattgataatcagagcataaatggttctgattagtttatgaattgaagcaatagctatctttttgaaccctttggtttgagaggatagctttttgctttcataataatctgctatatgacacggatttgtcttagctgcattatcaatttgtccaatagctcgataaagcaacttacgtgcgactgcattgccatgtttagtaatacttaaattagagtccatttctcctgactgatatctgcctggatcaattccgataaaagcattgattttattaggattactaaatctgcgtaaatctcctaactctgctaaaactctgacagcagtggtctgtgcaaagcctggaatgctttctaggttttctaaatcatgattaggcaaagacttcgctaacttaaccattcttgcgattaaattttctctttgatcacttaaattaagcaatctgtgtgcataatactgcacttgctcgacttctatgctagagcaagatacaactggataagcttgataagctaattcaattaatttatctgcagtccttagagcgtgtttaaaagcaatcccctttaagctcattaaccagttaataagctgttttttatcttctcttcttactaagtcacaatgaggatatcgcacaactatttgccagtaatttttacctttagcagaagaaaataaattttcaatttcaggaaaagtcgattgtagagcttggtgaagtcgatttttagctattaccaagtcacttgtcagctggtcatagaagcggctcaaagcattaagctgcttataagtttgggattcgctttgattaaccggatggcgataaagtctttgaattaaggctaaatgataagcatcagttttatcggtcttgttgtagcgtagccccatattcatagccgtagtcttcaagaaaagcctgcagtctgcgtgaataaacgccggtagcttcaaaaataatttgcggatgtttagaaaaagcggttaattcatgaagcaattgaataaaaccaggacgattattagtaatggttagttcatttttgctttcaccaattagttcacaaacagtagaagtagacttgcttacatcaattccaaaagtaacttgcataataaaaacctccaaaacttagtagtaaaacgtatttacttaagaaatcagatctaattttctaaactcgacatctagtgtccacattcttcgaagagactattgaaaacttaagtaaaactgccagttttgtatacgacatcaagtgtctaaagacctcagggcatatcgttttactactactttaattctacaaaagaataaaaatagtgaatcaattatcccgtcggataactaattcactatttagcttagaatgtttactatgtctaaatttaataaagaacaaaaaatagaaatttatcataaatggaaagatgaaaatatctcaatcagtcaattggctaaagcgtacagaatgaatctagctaatttagactatatgcttagattaattgatatgcatggaatagaaattttaactactaaaaaccaaagctattccaaagagtttaagcagcgaactattgaacaagcaatctttggcaataaaccatacttacagctgcctttggaactggggtttaaaagtattggcatgcttaacaattggattagagaatataagaaaaacgggtataatgtcattatcaaacagaaaggacgccctgcccgtgaccaaagaaaagcagaaatctcgcaaggaactggagaaagagatccagcagctgaaagaagaaaacttgcgattgcgtattgtgaacgaatacgtaaaaaaactaagtgccttggatcaagaagatcagaagaaatagctagggtgattacggatctaaggcaagaattcaaagttagtttaaattatgtattagctgcgattgcagagcaccctgagctacctataattgccagaagctcatactacaagattatcaaacgacagcccgtcaagcctaaacggtcaaagcttattgctagaatccatgagatttttaatcatcatcaaggccgctatggatatcgcagagtagctttgcagttaatcagagagggctggaaagttacggagaaaaccgttcgctattggatgcataaattaggtcttaaaggcatcaggtgcaataagcgcaaatattcaagctataaaggtactattggcaaaatagctccaaatttaattcatcgtgatttcttcgcagccctgcctaacacaaaatggtatactgatatcactgaatttcatcttaataatgaaaagctttacttattgcctattctagacggctgcggtggcgatatagtttcttatactatctccaaacatccagatatggatttagtaatgacaatgcttgacaaggcttttgccaaagaaacagctcttaataactgcatttttcatactgatcagggctgtcagtatcaaagccctcgttatcagcgagctttaaaactccatggtattactcaaagcatgtccagaaagagcaactccatggatgatgggctaatggagaacttctttggcctgctcaaaactgaaatgttctatgatcaagaatacaagtatcataatcttcaagaattaactcaagcaatcgaggaatatatcgaatactataacaacgaaaggataaagagcagattaaaaggcttaaccccgaaagagtatcgaagtcaagcctctattaatccaatattttaattgtctactttttacgtctcagtacatttttacattaattactattatttttcttcttaattagttaatttaaaaagttctggtcaaaacctgacacctttgacacttttcctctcaacaccttgatactactagctttatccatcatatctccattgacaccaaaacaattcaaaagctacccaatgcttgatataacaataatctgctagtgtcaacttaaccaacaccagaccgacaccatttgagttaataactgacacttttcaaatttcaagattcggtgtcaacaacggtgtcgcacatcgactaaaatgtgtcagctaaaccgacaccaaattttaacttggctatgtagattctcaaccattcgcactatattaaatgcaagcctgttcaaaaacttttagctttttgaatgaacgtgctgggcctacaacatcaagcttaaatgatgttcagaaacttatggtcaaaaaggatggattgaaatgacggaatatggctatgctagggtgtctacaaagggacaagaactagcagatcaaattaatcaattgcaaactgctgggatcagtgaggattgcattttctccgaaaaatttactggaactacaactgaccgaccacaatttgctaaactaactcaattggcgaaaccgggtgatgtgattacggttaccaagctggatcggttagctagaaatacccgggaagcattaaatgttattgacccactaatgaatcaaggagtgaagatcaatgtacttaacattggcatgttggaaaactcaactgtgggtaaattagttaaaacaattctcttagcagtggcggaaatggaacgggatatgattgtggaccgcacccaataagggaaacgttatgctaagttacaccggtctgattatcatgaaggacgaccccaaagagccattaccccgcactaccaagccgcttatgagtacttgcttactcattcctacaaacagactgcgagtgcttttgatatttcgatttcaactttgcaacggatccgaaagcaggtggagcaaaataatatagcttagttttaaaaaagtatatattattttgcgctggaggatttgaaaaatggtaaaatgttataccccatttatttactggattgatactaccggtctagactggcaaagcgatgaaatcattcacctaaccataacggatttatttggtaacattgtgttctcacatctgtttaaaccagtgaaaattgaaagttgggacccaactcagcagggtttccacacaaaagcacttgcccccccacatattcaatatataataaattacgcgtggtgctagttaagtcgttttagttaataaaaaagtccaatcggattagactcaagttgtaacttaaattaaatagaaaagagtctgatctaattgaactatctcaagcttaatcgtttttctcaccatttacaagttagctttgctcggctaaatgtaatttgtcgttctttgtacaagctttgtgctcctgatgagctgaaataccgtaaaaatattgatcaggttaagctcttagacagttctattttagcaatgcttatttggcaaactgaaattggtatcgaatctcaaagaagattttgtaaattctttgtcggtttgtctcattctcgctttaatcgtcgggcacgaatgcttttgcctttaatgcgctgtatccgtcaagattggaatcaagaagtaaaaacagctggagaattcttaattattgacagcttcccagttccagtttgtcagcccatccgcaactatcgcgtcaagatctttcgtggcatatctgatatcggatataaagccactaagaaaatctattattacggcttcaaggttcacgcgatagtaagtgatgacggctatgtgctttggacaccatatcgaagaaacatgaaaggcgctaaaaagcataacgatcatcaactgatggcaattagaagaacaattgagagcgacttttctttgcttagctactataacgctgaaaataactgggcaaggagcttagctggttttcagcagcggctataaatagccattttggcttataatatagcatattgcctagaacgatttaactagcaccacgcgtaataaattgcgtcttagaaagaggatataaaatatggacaaattacataagcaacaagtagcaaaacgacaacgatttgccattaagaaattaacagttggaacggcatctgtccttgttggcttaaccttcattattagtggtaatgccaaggcagatacgacagttgctgctcaaaatacattcacgactcaagtgactgatccacaagttagtgcccattcaagcaatattcggattagcgacgaatcaaatacggttgttcatcaaacttcatcaacattagttccaaataaaacaacaacgccagcgcaacaaatgccgataatccataaaacacagcaaaacaaccactgcccagtaagtacaacaaacacagcaaaacaaccactgcccagtaagtacaacattactatgaattttcgcgatgtcaccctacataagccaattcaagtgattagtaatggtcattatgtattcaaacaacctttcaagcagaccacaattcgaccaggggatagtgtggatcaagaatttactgtggccggttataaattaatgaattcagaagttttgaataagtatttctattttgataaacaaggtaatgcctgccttaagaaaggtattactacgcaagacattaacattaatttagattacgcatcattgtcaccaatcaaagtagagtatgttgatgtagataacgggcatattttagcatcaatcgttctagatagtttctggatggcccctgaatctccacaacaccgtgctggtgataagaaagcaccggatgcatcacgctatgaagccgcagccattaatattcctggatataaattagtttctgaacctgttttaaagggtaaaatcactggtcaaactcgaaattcgttagctgatcctaactatgtttatttaactttcaagtataagaaggttttgaaaaataattctgatagtaataggactgaattgttacttgttccagaagaagcaaatctaccgaacaaactctttacgattgctggtagctatggcgaaaggattgacctaaacaatggtaattatgagaaaaaaatgagtgaggagattagccattacgaaaaacaaggttactcctatataggaagtacagggacatatcttaattctgattatttcaattggtacgctaaggggatacatgtttacttgctaccaaacaaaccagtaactgtgcgttatattgatgagcaaggaaatatgcttaggaataatgatacgcttgcgttcaacctagataatcccaaccaaaaaaataatggggttaatccgcaaaaaggctggtatgcaaatggttcatggcaagtccaacctaagaaaattaaaggttatcgtcttgttcgtactcttggagtaacgagtggccagtatactgtataccaatacaccacaacttttgtttacactaaggacacagatccaactgatcccaaaacgccagagacaacaacaacaacaactgatccaaagacaccaagcgataagcttccggacaatcctggcaagtctggtcagacagttccagttaatattcacattcctgatggttatcaattagttcctggtgaaagtgttccaacattttacaccttcaaggatggtaaccctaatcaaatcattagttgttggttgatcccaactaatggcggtcaaccaacaactaatgatcatcaaggacaaggaacaccagctactaatacgcctacaaacactactcctaatggaaatgctgttactggcaaactagaaggtaatgttcctaacatgcaaactgggaagacgattacgtttcaaccaacgacagctaaggataaccaactaccacaaactggtaatgacaatagcttaacaaccgttgccgggattattgtaagcctgttaaccagttgcttagctgttcttggcattaataaacatcaaggctaatatgattacctaccaaccattccgaagctaatcaagacgcgatgctttaattagcttcggaattttgaatgatatatcattataataggatggaataaactttatataaatataagtaatggggattgatttctaatcttttaagaatactgtttatggttgattttttatacaatgtttccaactgagagtaaatataaaaagggagatactatgttatcagcaaagaattattacggccgtctggtaaagttaaaaccaaaacaagatcatttttcacttcgtaagttatctattggtcttatttctgttaccataggtattaccttatacttgggagtggacaactcctatgttatggctgatacgaatttgagggataataacaatcaacaattagccggatcgggtaatggcaccaatataataaatgataaagttaaaattccaaccggtgcttttcagtctaaacaaatgcaaactgaaaattgcaaagtaaataatcagatgttggataaaactgaagtaacaaattctactaaaaattcttctacactaaatgtggaaaattccaagactgctgatttgtcgagatttgattactctttatatacaaaaaaagtaaagagttttgaatttagaaattcagataataacgatgtaattagaacagtaatattaaacaaacctaccggtgttgaaactgtaactatgactttgaatgttagctgcttaaaagggagaaagcatcagcatcgatcgcacacatctactagatcgagtatttataattataaacctcaagttattgctgaagtaaatacatccaataatccattgccaaaaatatcaattttggagaaaaacgttttaccaaaaactttttttcaagtagataagaatacatttcttactcaacaggataaagagaactatgagaaatttatatcagttaataagaatgatattagcatagaattaccagctttttccattaatgatattgatattccaggctattcttatcatattaatgcaaaaaagactactcctggagcaggattaggtaaagaaaagttttacatctacactgaatcaccacaaacagttgttatcgactataccccgattacggttaaggttgaacataagatcatcacggtaacaccaaccgatccgaagacaccaagcgataagcttccagacaatcctggcaagaactatccaaagggtgttgataagaaagatctgaacaagactgttaagcggacgattactgttaataaaccagctggctcaactgttgatgctagtcaagagactactctaactcggacggctactgttgacgaggttacaggccaagttacgtatggcaaatggacaacctcaaagcttgataagtataatgcaccagaaattccaggttacactccaagtcaagcagaagtccctgcagttgatcaggtaacggttgattacacagatccaaaaattgaaattacctacacgccaaccgaacagactgggaagatcacatacgttgatccaaacggcaaagaagttggtactaccccattaacaggaaagacggatgaagagattccagttacaccaaacgttcctgcaggttggcagattgttcctgatccaaagattccaacaaagatcaccgctactccagacggcattcaaacagttacggttaaggttgaacataagatcatcacggtaacaccaaccgatccgaagacaccaagcgataagcttccagacaatcctggcaagaactatccaaagggtgttgataagaaagatctgaacaagactgttaagcggacgattactgttaataaaccagctggctcaactgttgatgctagtcaagagactactctaactcggacggctactgttgacgaggttacaggccaagttacgtatggcaaatggacaacctcaaagcttgataagtataatgcaccagaaattccaggttacactccaagtcaagcagaagtccctgcagttgatcaggtaacggttgattacacagatccaaaaattgaaattacctacacgccaaccgaacagactgggaagatcacatacgttgatccaaacggcaaagaagttggtactaccccattaacaggaaagacggatgaagagattccagttacaccaaacgttcctgcaggttggcagattgttcctgatccaaagattccaacaaagatcaccgctactccagacggcattcaaacagttacggttaaggttgaacataagatcatcacggtaacaccaaccgatccgaagacaccaagcgataagcttccagacaatcctggcaagaactatccaaagggtgttgataagaaagatctgaacaagactgttaagcggacgattactgttaataaaccagctggctcaactgttgatgctagtcaagagactactctaactcggacggctactgttgacgaggttacaggccaagttacgtatggcaaatggacaacctcaaagcttgataagtataatgcaccagaaattccaggttacactccaagtcaagcagaagtccctgcagttgatcaggtaacggttgattacacagatccaaaaattgaaattacctacacgccaaccgaacagactgggaagatcacatacgttgatccaaacggcaaagaagttggtactaccccattaacaggaaagacggatgaagagattccagttacaccaaacgttcctgcaggttggcagattgttcctgatccaaagattccaacaaagatcaccgctactccagacggcattcaaacagttacggttaaggttgaacataagatcatcacggtaacaccaaccgatccgaagacaccaagcgataagcttccagacaatcctggcaagaactatccaaagggtgttgataagaaagatctgaacaagactgttaagcggacgattactgttaataaaccagctggctcaactgttgatgctagtcaagagactactctaactcggacggctactgttgacgaggttacaggccaagttacgtatggcaaatggacaacctcaaagcttgataagtataatgcaccagaaattccaggttacactccaagtcaagcagaagtccctgcagttgatcaggtaacggttgattacacagatccaaaaattgaaattacctacacgccaaccgaacagactgggaagatcacatacgttgatccaaacggcaaagaagttggtactaccccattaacaggaaagacggatgaagagattccagttacaccaaacgttcctgcaggttggcagattgttcctgatccaaagattccaacaaagatcaccgctactccagacggcattcaaacagttacggttaaggttgaacataagatcatcacggtaacaccaaccgatccgaagacaccaagcgataagcttccagacaatcctggcaagaactatccaaagggtgttgataagaaagatctgaacaagactgttaagcggacgattactgttaataaaccagctggctcaactgttgatgctagtcaagagactactctaactcggacggctactgttgacgaggttacaggccaagttacgtatggcaaatggacaacctcaaagcttgataagtataatgcaccagaaattccaggttacactccaagtcaagcagaagtccctgcagttgatcaggtaacggttgattacacagatccaaaaattgaaattacctacacgccaaccgaacagactgggaagatcacatacgttgatccaaacggcaaagaagttggtactaccccattaacaggaaagacggatgaagagattccagttacaccaaacgttcctgcaggttggcagattgttcctgatccaaagattccaacaaagatcaccgctactccagacggcattcaaacagttacggttaaggttgaacataagatcatcacggtaacaccaaccgatccgaagacaccaagcgataagcttccagacaatcctggcaagaactatccaaagggtgttgataagaaagatctgaacaagactgttaagcggacgattacgtctcaaccaacgacagctaaggataaccaactaccacaaactggtaatgacaatagcttaacattaatgggcttaggtgcctccaccttattgggaatgtttggccttgctgctgtaaacaagaagcgtaagtaatcaaattagctctacaattttatccctttgtcagtactgatgaggtattttgatgaggttagtttaagtagcgaagctgcttgagctgaccttttcttttagcttagtttttaccatgagatttgagagctagtagacttcggatacgggaatgatcaaagttgcgaaaaccataagctgttattctagtggtcttaattttattattgtaagcagtcgttatcaatacgggttgaacaaagggactctacaattgtaagtactgatgaatttaacatcagtgcttattttggttttctacgaatagtcaaggatattaaaggaattccttggaatttagctggatagaaaagttaattaaataattaaaatggctcaaagttaaatttaaagtataacaaaacaagctcatgaactagatttattgaacctgtcaaatcttttgtgtaaatagttctttctcgtaaattgatttttgaattatttattcaaaataagattctaaggtatcctgaacctgaccaaagcctttatgaattcggttgaaatagcggtcattgtagctcattgcctggatgccaataaatgcatcaagcgactgttcagttggaaattctgccttaggcttagctttacgcttgatgacgttgttaaaggattcaatcatattggttgaataaattgaagctctgatttgtttgggataattgtagaagaccagcagatcgggctcaatttccttcaaacctttgatgacattgctataagctttattccatctggcatagaatttgtgcaagacagctgcagcttctttttggcttgtctgttgatgtatctgcttgaattcgttcatgatcttttcgcggtcatccacccggactttagcacagatattgcgcatgacatgaaccaggcagcgttgaaaatgagctttaggataagtcctggccaaggctgttttcatgccaacaacaccatcagaaagaaagagttcaacttgcttcaagcctctggacttcatgttttgaagcatctctgtccagacttcaatgttctcactaggagcaatgcagtagtcaatgacttccttatgtccattaggtttaatgccaatggcaatatatactgcttcacgctcaaacgtttctcggcgcaaaggaaggtatgtcgcatccaaatagacacagaaaaacttgtcgcttagcttgcgcttgtgataagcctcaaccttggggagcatctgcttggaaatatttgatacttgagctggactataatgactgccatacattttctcaatcaagtcagcgatttctctggtagttacgcctttggagtagagcttgataatcgtgctttccaaaacatcagagtgctgcttgtagtcaggcagcgtgtgctgatgaaactgaccgttgcggtctcgaggcacttgcacttcaattggtccaaactgggtatcaaccttgcggaaataagcaccatttctagaattgccagtattccagccatttctggcatagggatcatagcctagaaaggcagtcaactcagcttctagcaagttattaacagcctgttgtagctctttgcgcaataaatcatttattttgtctggattgaatagagcttgagcaaaatctttggtaaaatcattcatgaaggagttcttctttctgtatgtgtttttttgttcaaaccaatcatacgagaaaggaactcctttttctaatgtttaaagaaataaatttaaggaatcattcatccttacacaaactattttacagtctctccaaagagtttaagcagcgaactattgaacaagcaatctttggcaataaaccatacttacagctgcctttggaactggggtttaaaagtattggcatgcttaacaattggattagagaatataagaaaaacgggtataatgtcattatcaaacagaaaggacgccctgcccgtgaccaaagaaaagcagaaatctcgcaaggaactggagaaagagatccagcagctgaaagaagaaaacttgcgattgcgtattgtgaacgaatacgtaaaaaaactaagtgccttggatcaagaagatcagaagaaatagctagggtgattacggatctaaggcaagaattcaaagttagtttaaattatgtattagctgcgattgcagagcaccctgagctacctataattgccagaagctcatactacaagattatcaaacgacagcccgtcaagcctaaacggtcaaagcttattgctagaatccatgagatttttaatcatcatcaaggccgctatggatatcgcagagtagctttgcagttaatcagagagggctggaaagttacggagaaaaccgttcgctattggatgcataaattaggtcttaaaggcatcaggtgcaataagcgcaaatattcaagctataaaggtactattggcaaaatagctccaaatttaattcatcgtgatttcttcgcagccctgcctaacacaaaatggtatactgatatcactgaatttcatcttaataatgaaaagctttatttatcgcctattctagacggctgcggtggcgatatagtttcttatactatctccaaacatccagatatggatttagtaatgacaatgcttgacaaggcttttgccaaagaaacagctcttaataactgcatttttgatactgatcagggctgtcagtatcaaagccctcgttatcagcgagctttaaaactccatggatgatgggctaatggagaacttctttggcctgctcaaaactgaaatgttctatgatcaagaatacaagtatcataatcttcaagaattaactcaagcaatcgaggaatatatcgaatactataacaacgaaaggataaagagcagattaaaaggcttaaccccgaaagagtatcgaagtcaagcctctattaatccaatattttaattgtctactttttacgtctcagtacagtgctttcgaggcttttcttttatattattttttcttagaaatagagtcacggatatttaattgactatggcaagtgatcgtaagtggaatttgaatatcttccgtaattagatctttagccaaacgaacggcagtcttgcccatttcttcagtattcatatagacactggatagggtaggagttaagaagcgattgatatctacatcatcaaaactaacaacagagatatcgtcagggatgttaacacctgcatcactaaaggctttataaacacctaatgccataggatcactaccgacaacaacagcagtaggacgttgttgcagttttaagatctcttttccagcttcaaaagcagagttagttgaccaatcagtaataaaagaatggcagtactggtcaagattgtggagtttcatccaggacaagtaagtgagttcacgtagatcatttttttcacaagcaatcttaccgtcaagatcaagaaccaatgattttccaccgatgtaaacaatgttcttgtgtcccaggttatagagggtatcaagaatatgagaagtttcttccacaaaatcattacgaacgatattacaattatgaatattggtgttgacgtcgataaaaattatatggggattaatgctttgaatctgcttaattgctacaggtgtcatttcaccctcgattagcactgcgccaaatttagctaagtcagcccaatttttattatcatcttctattctaaaaggttgctcaatacgtaaatgccatttcttggcttcttcattaatgcctttatgcagattgagaaaatagggatcggtgatttcacgagatttgttataacgcatgattagtgcaatcgagagctggttatcagtttgcttgggaccaggatgtttttgagatttcgaataatgcaggcgtttggcggtttcgataacgcgggcacgactagcctcattgattctaaaagttggatcattgtttaaaattcgtgatacgctagctggcgataccccagcaatacgtgcaatgtctctaatacttgccataaagatgctccttgtttgtttactgtttacattatacaacttttagcaagaaactggtgtataccgaacttgaggataatagtttagtgtccataaagtaagtcatattgaatcaatgttacttactttatggacactaaatttacttattttactacactacatagtaaagtgtagtaaaataagtaaaaaagcaattgaaaaagaagaatatggaaataataaaatcttaataatttgttcgcttgtttttatatttgtaattcattaaacttatgttcgaaataatgaaaggagaaatatatttttcaattgtaggtaatataattccatattcgtatattgacagtacttatgaaacaaaaatcattgattagtcaactagcaaaaatacataacggtacaattactcatcgtgaattagcattaaatggagtatcaagttatagtatttcgaaagctgttcaggatggtacgttagaaaaaatacgtccgggaatttatttatttggtgatgataccgaggatatattttatagtttgcaacaaaaatataaaaaaggaatctattctttagaaacagcattatatttatgggggttaagtgatcaatatccttttagcttagatatgacttttcctaggggctacaataatccaactttggatattgaaataaatccacatattcaaactaaaagtttggctactcagggaataactcaaactgaatcattcaatggaaatgtgattaatctctatactcctgaaagaactctagctgaaatattgcgaccgattaatgctgtagatatcgaaataattaccaatgccttcaagatgtggaataaggaaaagaaaaaagacataaatacattaatgtcttttgcagaaaagtttagggtaactagaaaggtaaatagctacttagaggtgttgttgtgaaaaattatgttgatgagaagcagttcaaagcagatgtaagaaggtatgctagagagcataatataaaaggaaatgagattggtcgattatggcaagaaattatgttagatgatttgctagaaagaatttcagtatcaaaatatcgagataatttcattttaaaaggtggttttttgttgtcggctattgttggtatcgataaaagatccacggaagacattgatgctgagataaaaggattagatttgaccgaaaaacaaatagctaaagtatttgaagaaatctgtcaaataaaattagcgggggatctattaagcatttcgttgtcagaaattgaacagattcatgagcatgaagagtacaagggctatcgattacattttaatgcttcttttcggaagataagatatccattaaaagtagatgtttcaacaggggatgttattacacctagggagattgaatatagctataaattacatttagaagatcgacatattaatatttgggcatatactatggaaactatagtagcggaaaaattagaaacggtaattacgagaggaatagctaatacacgtatgaaagatctctatgatttattcatactgcagagagaacgaatcaatttagctactttaaagtcagcttttgctaatactacgaattaccgtgaatcaatcttttggacaggacaagatatagattataagtattgtctaagacaagtagatattattgctgaaaatagtaatatgcagaatctttggaatagatacgtgagaaaacatccttttgctaagggaatcacttttactcaagttattcaggcagttcaaacttggctaactaaattagagtttgaaaaataatttcaatcaaaaatgacgctagttgatcgaaccagcgtcatttttttagataatagatgtagaaaatagtttgaaaaacgattagtttttatagaaatctttattatactttacttgtcttcgtagccctttgggtgactcttgtgccagttccaagcagttgcgataacgtcatcaacactttcatgctttggcttccagcccaaaatagttcttgctttggttgaatcagcaaccaaagagtcagggtcaccgccacgacgtggacccattgtgtaaggaatatcaatccctgttacttttttagcagcgttcaaaatttcaaggttggagtaaccttgagcagtacccaagttaaagacatctgacttattagtctccatcatatgtttcagtgccaaaatatgagcatcaattaaatcttcaacttgaacgtagtcacgaacgttggtaccgtccttagtgtcatagtcatcaccaaagatagtaaacttaccatccccagaaattgcactcttcaaaatatttggaatcaagtgtgtttctggtgcgtgatcttcaccgattgtgccatcacttgcagcaccagcaacgttgaagtagcgaagagcagtgtacttaataccatcagctttatcagcccaagccatgatcttttccatcatcatcttggtttcaccatatgggttgattggatcaagtggggtgtcttcggtgattggcaatttcttaggaataccataagttgcagcacttgaagagaagactaagtatttaacaccagcgtcattcatagcttgtaataatgaaatcatgccagtaacgttattgtcatagtacttaagtggctttttaactgactctggaactaatgaatatgctgcaaagtgcattacagcatcaatcttttcatcacgtaaaattttgcttaccaaaaaagtatcttcaatatcgccttggtaaaacttagccttaggatctacagcctttctgtgaccagtatataaagcatctaagacaacaacatcattgccttctttaactaattcgcgtacagcgtgtgagccgatataacccgcaccaccgacaactaaaactttcatgttttgcgctcctttattttagttattatcttttattgaaatcgattacattataacacatattttagtaaataatttactgattttaaataaaatatttaaaatcaaagcaatttaaatgaaaattcgcaatcttggctaggattgatccgatatttgtcttcaacattgctgccccaactgtcaatgccgccaacaccgcggacagcaccagcaattaccaaaacagttctgcgggctaatggcagttcttcaatatgagttgcattttctagttcttctgctgtgtagggaaggcaactgaagttgaatggcttatcagtttgctcaacggtgaggtcaaaatcctcattagaatgatcagcattgttgagcgtagtatttctagtgattttgagttgatgcgtttgcatgtgcatcccattttcctgtggcactaggtatttggttactggcaatcccttaattttaaaagagccagcactggctccagccatccgatcaggataagtctcaccagataagccttcatattcaaagccactagctagagttggtatgataaagcgcattccaattactggaagcggtggtaaatcttttttaccaaaataacgcatcttaattataacatgaccattattgttaatttggtaagtaatttcaacttttgtttttggaatagttaaagtttcataaataaaagtaatttcgactttacttgcgtactcatgattagaaaattggttgttgagtggagcgattggcaaatctgcaaaatcatgttgatcaactttgagctgaatttcagtacagtggctaaacatatcggcgccgagccattgagctgcttttaagttgaaaccgttgccgcgatcgttatcagtagttgcacgccaaaaggttggggtaggaacgcgataaaaccattctttacccttaatttttaaagactctaagccacctttttcatagctgaaaatatattgcttatctggggtattaatgcctaaagtagcatccccatagattatatgtaaattatttgtgtaagccatagtagtatttaacctcctgcattgctggttttggcgtacgatcggcgaacatcaagccatctcctgaaaattcatagtcggaatggcggtcatcgaaatcaccaccataacgcaacacgtcttggttgctaactggatcatgtactaatagcgcttggtcgatgaagtcccaaataaagccgcctaaatattgtgggtattggtcaagcaatttaatgtaggaacccatgccaccatcagaattacccatatcatgcatatattcgcattctaaaaatggcttttgaggcttatttttaagatattcttcaacatcttttggtggtaaatacatccagctttcaagatcagaaatcttgtcctttaattctggcgtatgaaccacgccttcatagtgggtcaggcgactatgatcttgtgctttataaaatttattcatagccgcaatgttttctccggcatatgattcattgccaagagaccagaagagaatggcggtatggtttttttaagtttcataattgttgcgggcacggtcaattacagcttcacgccattcaggaatagaaccgggaacattatctgaaggttcaacttgtcccatcttttgccaagtaccatgtgattcgagattattttcagccatgacatagattccattttgatcgcagagatagtaccacggaatctgattaggataatggcaagttctaaccgcattgatgttattttctttaaaagcatgtatatcttgtttcatatcagttaaagtgatgctgcggccacgcttcatattccattcatgccgattgaccccattaataattagacgttgaccatttaataaaacaaccttgtcagaattaatttcgatttttctaaagccgaattggtaaggaattagttcaagtaaatcaccattttcagcgtgaacttcaataattagttggtacaaatatgggtcatggttatcccaaagatgcacatttttgaataattctttttcaatttttatggttaagctgattggtgcttttttctcaagtagagttttgccattaatatcttctacgaacaagtgaactgagccagtatttttgcctgtaaagtgcaattgagcattaaagattccatcttggtaattatttgtaacttctggttttaaatcgagatcggttaaatgcgtctcaggtaggccgagcaattcaactgaacgaaaaatgccagaaaaacggaacatatcctggtcttccaagaaagaggcagtgctatgtttgaaaacttcaactgctaaaatattgtttttgtttttaatgtaaggtgttagatcaaattctgaaggagtgaaactgtcttcggcgtaaccaacaaaatgaccattgagccaaacatacattgctcgctcaactccttcaaaaacaatgtgaacatcacgacctcgcaaagtggaatttaagtcaaaatgcttaatgtaagagccaactgtgttatctgcacctttgctaaaagagtcggtagctttttggttgattgtgtaagcaggtcgacgataaatttttccttcccacggaaagagcgtattaatatattgattttgagcgtaattatttagctcaatttcacttgggactggaatgtgatcaaatgatgaagaatcgaaatctgttttaaagaaatcaacgggtcgtgtttgtggattagctgaaaacttaaaacaccagtcaccatttaaactttgaacaaaactactagtttgcttttgccattcgcgatagttcttgaaatagggatgatcgctgtgggcaggaacttgattaacgcggaaaacttcggggtcatcaagccagctaagatttgctttcatgaaaatacctgatttctataaaaaaattaaccttgaaaacgcttatattatagcatatagataataaatttacttaataagtaaattatttactgaaaatattttgaagattaatctttttgacccgaaaacgaatgataaagtgcttatgatatttattggaattacgtaaatattttgtataataaagttaaaaattatttatttaagatagaaaagatataaatatgacaacaattaaagaaatagcacaagaatcagggtattcttcagctacggtttcgcgcttattaaataatgatcctaatttgtcaattacggctgatactaagaacaagattttagaaattgccaataaattgggctattggaaggatcatcaggagaagaagattcgtccaacaattgcgttactataccgagtaaatcatgaagaacaattgcaagatgaatactttacttcactgaagcaggcattaatttcaaccgtggaaaatgaatcattgcaaatgaagaccttttatgatgctgatgatttgatcaagcatgcgtctctttttcaaggctttattggagttggcgcagctccgattgaaaatgaaacgcttaagaagttacatgaggttctgcctaacggtgtttttgtcgatactaatccagcgcctgaattatttgattccattcgcccaaatttaacgctgacagtaaaaaatgcaattgatctttttctcgataaaggatatcagcgcattggttttataggtggcgttgggcctaagcatgatcatattcaagaagtagatgtacgtgccactgcttttgcggagtatatcaaggtgagaggcaaaagtgatgaattgatgtttgttaatggcccgtttagcgttgctaatggctataagttgggaaaagaggtactggctaaatgcaaaaataaattgcctgatgcatttttaattgcttcggatactttggcagttggagttttgcaagcttttaatgagaacaatgttaatgtgccaaaagatactgcaattttaagtattaataatagtaatgtggttaagtatgtttcaccgccactttcttcttataatattgatcaacaagagatgattgatatggcattaaatatgctaacgaatctgattattcaacctaatcgggcacacattgatgtaaatatgaatactaatttagttgtgcgcaagagttttgtgcctaagaagtaaattaattagtaaataaaaatattttttagtaatactctcaaaagagaatgctaatttaatgcgttctctttttgtttagctttcagtaaataatttattaaatataaataaattctttacttaacaaaaatagagaatatactaaactatgtaaacgattacaattaatgattgctttagggggcaaatttatgacacacagtgacaagtcagggaagcagattctttcctacgcatcattctgtttgggtaacttaggtcactcggctttttatggtgtgatgagtacatattttattatttttattactagcagcatgttcagcggacttaatcagtccgttgcagataagctgatcggcttaattacaggattgatggttgtaattagaattgctgaattggtaattgaccctattctaggaaatatagttgataatactaaaactagatggggcaaattcaaaccttggattttaattggtactttagtaagtgccgccttattattagttttgtttactggcatttttggattagcacaaaaaagttggattctctttgcgattttatttgtactaatttatatcagttttgatgtattttattcattatctgatgtttcttattggggcatggtaccagctttaagtgaagattcacatgcacgtggtatttatacttctttaggtgccttttcaggaactattggttggaacggattaacaattattgttgttccattagttacagctgtgacttatgcggtaactggtaaacatgaggaaggtgcgccaggttggttagcatttgcggcagtaatttcagcgttagcaattatatgtgccttgattgtttgttttggtactaaagaaaagcacaatattattagaaactcagctaagcaaaagactactttacgtcaagtattcggtgctattttccataacgatcagattttatggccaagtttagcatacttgctttactcattagcatatgtaattaccaatggtgttttgttctatatgtataaattcgttattggtaagccaaatgacttctgggtagttggtgttattgcaacaattatcggtttctgtattagtccaatgtttccgattttgaacaaatacattccaagaaaatggttattcattgctggacaaacttgcatggttttagcttatgttttgtttattttcggcagagacaacgtatttttgatggacttgggcttggttcttttaaacattaactttgctcaattggtaactgttttaacattaactgacgcaattgaatatggacaacttaagaatggtcaaagaaatgaagctgttgttttagctgttcggccgatgattgataagttcggtttctaatgctttagttggttatgttgcaattgctgctgggatgaccggttctgcaactgctgcagacatgactgctcatgatattagcacctttaatatgatggcattatatatcccacttgctttggcagtcttatcaatcgtagtctttttgactaaggtaactttatctgaaaagaaacatgccgaagtggttgaagaattaaaagatcaacttgcagaaggtaagattgaaaagaatgaatctaatactcaagttagacctcaagatcagactatctatgctcctgcagacggtaagttaatgaagatggcagaagtaattgacgaagatggtaagccattcccaggaaagggttttgcaattaaaccagattcaggcaatatttatgctccatttgatggtgtagttaggttcacttttggtactaagcatgcttttgaaattgtttcaaataatggtttacaagtagttgttcatgtcggcttaggtacagttaacttgcgcggtgaaggttttgaaacttattatgatgatggtcaaaaggtaaaaaaaggtgacttgctgttagagtttgatcgtaatttagctcttaagaatggctatcaggacactgtagttaccttctatacacaaccaggacgaattgtaaaatctagtgaaattgaagctggtaagattgttgagcatggtgaaaaagtattagatgtacaatttaagtagaggaattacaatgacacagttaaaacgttttttatatggtggggactataacccagatcaatggccagaagatattaaagtttttaaaaaagcggatttaaattctgctacaattaatgttttttcttggagtttgcttgagtcaagagaaggccaatatgatttttcaaaattagataaaattattcaagaattgtctgatgcaaattttgatattgtacttgctacttctactgctgcgatgccagcttggatgtttaaaaaatatcctgatgtagcacgcgttgactatcaaggacgccggcacgtctttggtgcacgacataacttttgccccaatagtaagaattatcaagttttagctagtaaattagtcgagaaaattgccgaaagatatagtaataaccctcatattgctgtttggcatgtgaataatgaatatggcggcaattgctactgtgaaaattgtcaaaatgcttttcgtacttggctcaagagtaaatatcaaacactagataacctgaatgaggcctggaatatgaatgtgtggagccatactattcatgattgggatgagattgttgttcctaatgagttaggagacgcctggggaccagaaggtagcgaaaccattgttgccggtttatcaattgattatttacgttttcaatctgatagtttacaaaatctttttcagatggaaaaatcaattattaaaaagtatgatccacatactcctgtaactactaatttccatggcttacctaataagatggttgattatcaaaaatgggctaaagatcaagatattatttcttatgattcttacccaacctacgatgcacctaagtatttaccagcatttttgtatgacttaatgcgtagtttaaagcatcagccatttatgttaatggaatctgcaccgtcgcaagtcaattggcaaccatatagcccgctgaaaagaccagggcagatggcagccacggaattgcaagcagttgctcatggtgcagatacggttcagtttttccaattaaaacaagcagtaggcggctcagaaaagttccatagtgccgtaattgcccactcacaaagaaccgacacgagggtctttcatgaactagaagatttgggtaaaaaattaaaaaagattggcccaactgttttaggctctaaaactaaggctagagctgctattgtatttgattgggataacttctggtcatatgagtacgttgacggtattagtcaagattttaattatatggaatcaatcttagattattatcgccaattttatgaacgcaatattccgacagatgtaattagtgtcgatgatgattttagtcaatatgatttagtagttgctcctgttttatatatggttaaagcagggctaagcaaaaaaattaatatttatgtcaaaaatggtggcaactttgtcactacctatatgtctggaatggttaacaatagtgataatgtctatcttggtggctatcctggcccgttaaaagacgttatgggtatttgggttgaagaaagtgatgcaattgtaccaggacataagacaactgtttcactaaatggcaaggattataaagcgagtttggtttgtgacttgattcatccagaaaatgcaaaagttttagcaaagtactccaatgagttttatgcaggaacggctgcagtcacggaaaataaatatggtcaaggtaaggtctggtatgttggtactaagttggatcacattgggttgacgcagctattcaaccatattgttttgacagctaacgttgaatcattggtgggcgacagtcataagttagaagttactaagcgagttactcagtctgggcaagaattatactttgttttaaatatgagtaatgaagaaagaaaattgccacaaaaatttgtagagtatcaaaatattttaactggtcagcaagctcatgatcaaatgaaggcatgggatgtacaaatacttgttaaataaatgattttttccttaatgaagacaagaagttagacaaacgatctagcttcttgtttttttacttaaataaatattttatttatttaagtaaactatttactaaaagataatgaagagatatactaataactgaaaacgattacagaataaatttgaggtaaaaacaatgaataaggaagaattacttaaagaatatgagacaacttttggtgaaaaaggtaaggatgtctttttctcacctggtcgaatcaacgtgatcggtgaacacactgactacaatggtggtcatgttttcccagctgcaattagtttgggtgtttatggtgtttacggcccaagagaggataaaaaagtttgcttgttttctggcaatgttgatggcgatatcgtggaattcgatattgacgacacaactgttgagaaagatgatcgcttttgggctaactacttcaagggcatgattacgtacttacgtgaaaaatatgacaacattgatcatggttttaatctttatatcaaagccaatttaccatcaggttcagggctatcatcaagtgctgccattgaaatgctaatgggcatcattttaaaggatgaatttaacttagatgttgaccggattgctttagccaagatgggtcaaagaacagagaatgaatttgttggcttgaattcagggattatggatcaatttgcctgcattatgggtaaaaaagatagtgctatcttcctcgattgcaatacattagattatgagtataagccactcgctttaggcgattacgaaattattattatggcaactaacaagccacataccttagccgattctgcttataatgatcgtgttcgtgaatgtcatgatgcagtgaagaagttgcaggctaagttagatattaagactttaggtgagcttgataatgatacttttgatgaatatgcatatctgattaataatgaaactgaaattaagcgtgctcgtcatgctgttagtgaaaaccaaagaactttgcgggcaacaaaggccatgcaaaatggagatttggaaaaattgggacgtttgattgatgcttcacacgtttcacttcattacgattatgaagtaactggtcaagaactagatactttagctgaagcttcatgggctcaacctggcgtcttgggtgcaagaatgattggcggtggcttcggtggtagtgccattgcaatcgtcaagaaagaccaagctgaggcatttaagaaaaatgttggcaagatttaccgcgacaagatcggttacgatgccagcttctatgatgcggaaattgttgatggaactaagagaatttaatcagacaagaggataagtatgaaagttattgaaaaatttgcggatgaagttattaatagtggagcgtatgagccgctcgatcgcgtatatgtgattaacaaaattcgcgctttagttggcgatgaggcaagtagcgttgaagctaatgatgaacaaacttcagttaagcaattagttgatttagccgtgcaaaataaaaagatttcggatgatgttacttcacgtgaagttttgaatgatcaactatacgacttgataacgccaacaccatctaaaactaatggcatcttttggcaaaaaatgcaaaaatcacctgaaaaagcaacagattggttttataaactttgcgaaaacaacaattatgtcaaaaaggaagcaattgccaagaatgttgtattctcagggaccagctctaaaggacatggcttagaaattacaattaatttgtccaaaccggaaaaggatcctaaggcaattgcggcagcagctcatgcaactggtaagaaatatcctcaatgtgcactttgcctagaaaacgagggttaccttggtggatatggcaaaaatgctcgttcaaatttgagaattattcgcatgaatattggtggccgcccttggggatttcagtattcaccatatgcttacttcaatgaacattgtattttcttagatcaaaagcatattccaatggtcatcaaccaacaaactttgattaatttggttgaaattgaaaagacgttaccacattattttgttggttcaaatgctgacttgccaattgttggtgggtcaatgttagcacatgaacactatcaaggcggacgtcatacttttccaatgatgaaagctaagattaagaaaaatgtagtctttgatgattatcctgaagtggttgctggcattgttgattggccaatgagcgacttgcgcttgattagcgataattcgttagatttgattgaattgggcgctaaaattattaatttctgggatcattattcagattctgctcgtcaaattaaggcttttgatggtaaaacacgtcatcatactgtgactccaattatgcaccgtgaaggcaagaacttcgtacttgatctagttttgcgtgacaacaacactagtgaaaattatccgttaggtattttccacccacataaagaattgtggcatattaaaaaggaaaatattggcttgatcgaagtaatgggccgtgctattttgccaggtcggttaaagagtgaacttgaagaagttaaaaaatactggttgggccaagataataagatggctattagccacaaagaatgggccgatcaaattaaagcagagcagaatattactgccgagaatgttgacgctgtgatgcagcaagctttagttgaagtctttgaacaagtattgcaagatgccggtgttttcaagaataatgcagatggcgatgaaggctgggataagttcattaccgctttaactaggcagatttaactcatcaatgtgtaaaacgagatctgttggatctcgttttttttgttagcggtaactcatatattctgatggttaaataatttataatatttatgaaagcgaatacaaaagaagggcaagagtatgaagacaagttttagaaaatatggcagaaaagataataaagatctttgtgaaatcacactagagaatgatcacggtatggtagttaaggtattgaactatggtgctacattggaaaaggtgttgcttgatggtgagaatatgattttgtcactggataagccagaagattacgacaaggagcgtaattatctaggcggtacggttggacgtattgccggaagagtgagacgaggtttatggcggcacggcttagaattacatcaattaccaatcaatgaagggcctaaccacattcatggtggtattgggactgatactgaaatttggaattttagacctagttgtaatgaaaaaggtgctcgtgttgatttaacactttttgatccagatgggtataatgattatcctggtaatttaaaattacacgctcgttatgagttagataataacaatattctgcattattcattgggtgccatgagtgataagctgactatttttaatccggttaaccatactttcttcacattaggtgaaaagaaaatgattaatgacttgcaactgcaaatgaatgctgattattatattccagttgatgagactggcttgcctgatcgtggtatggaaaaagctgatggaacagcattcgattttagaaagaagaagcgagttggggatgcattggaagctgatgatccgcaaattaagaaccgcgatggaatggatcatccatttatcttggatggcaatatgccaaatgcagtgctaacttctgctaaacacaagttaacggtaacgactaatgcgccatctctgattctgtacactggtaatggctttgaccacactggcaagtatacagctgactttggtccgtattgcgggattacttttgaagcacaagtgccgccagcagaaggtgatgatttgggacgcatcacgcttttgccaggtgaaaaatttaagcggactgttgattggaaatttgaataaaaatatggagaacatccttactgaatgaattggtagggatgtttcgagactgtaaaatagtttgtgtaaggatgaatgattccttaaatttatttctttaaacattagaaaaaggagttcctttctcgtatgattggtttgaacaaaaaaacacatacagaaagaagaactccttcatgaatgattttaccaaagattttgctcaagctctattcaatccagacaaaataaatgatttattgcgcaaagagctacaacaggctgttaataacttgttagaagctgaattgactgcctttctgggctatgatccctatgccagaaatggctggaatactggcaactctagaaatggtgcttatttccgcaaagttgatacgcaatttggcccaattgaagtgcaagtgcctcgggatcgcaacggtcaatttcatcagcacacgctgcctggctacaagcagcactcggatatcttggaaagcatgattatcaagctttactccaagggcgtgaccaccagggaaatagccgatctaattgaaaagatgtatggcagccattacagtccagctcaggtatcaaatatttccaagcagatgattccaaaggttgaggcttaccacaaacgcaagctaagcgacaagtttttctgcgtctatttggatgcgacataccttcctttgcgccgagaaacatttgagcgtgaagcagtctatattgccattggcatcaagcctaatgggcacaaggaggtcattgactactgcattgcacctagcgagaacattgaagtctggacagatatgcttcaaaacatgaaatcccgaggcttaaagcaagttgagctttttctttctgatggtgttgttggcatgaaaacagccttggccaggacttatcctaaagctcattttcaacgctgtttggttcatgtcatgcgcaatatctgcgctaaagtacgcgtcgacgatcgtgaaaagatcatgaacgaattcaaacaggtgcatcaacagacaaacaaagaagaagccacagctgtcctgcatgacttctataccaaatggggcaaggtttacagccatgttatcagaagcttgaaagacatagaaccagatctgctggtcttttataactatcccaagcagatcagagcttcaatttattcgactaacatgattgaatcatttaacaatgtgatcaagcgcaaagctaagcctaaggcagagtttccaactgaacagtcgcttgatgcttttattggcattcaggcaatgagctacaatgaccgttatttcaatcgaattcataaaggctttggtcaggttcaggacaccttagaatcctactttgattaaataaataattaaaaaatcaatttacgagaaagatctatttacacaaaagatttgacagtttcgatgtttccttctttggatattatgatttgattttacaagtaaatccatattaatatttaaaatatttagaaatcaactgaaaggtatagtaaaaatgatgacaaacgaaaagattattgctttagtcaaggaagaatatctaaacaagattccaaaaatttttcgcaagcatgctgttgaaggcacttgcaagttaatcgctagagaacatcccgatttatacaaggcttttgaagatggtgaaccaaccgcagaagaaaaacaacaaatgacagagttgattaacgggattttcgaacagagaatgaaaaagcataagatgttataaaaagacgctggaatgtaatgattattagatcgctacattctagcgtttttttgattttaattttgatttattaaactaacaggtagcgtataaacactttctaatgaaacagagggatcattaatttgacgtaaaagtaaatcgcacattaattcagcaatttcttttgtatgttgccgagcactaattaaatttggaaaaagactttgaatcaaatgactaccatcaaatcctgtgattaaaggtacttttcctaaataatcagcacattctttagctagtaaagctgtaatgtcatcggtacaacaaattgcatcatattcgtcatcctttaaaaattgaaggatggctatttttttagcaataattgagtcactggcactgagtgagcgaagatcgaatttagaatcaaaagtgttaaatacgcgaatcattcctttgattcgatcacttattgggtaatagtcttctttagcaccagcaataataataattttctttttcttttgttttagaacagattgtgcgatttgcatacctgcgtcatagttattagattgaacagttggtatttgaggactaagtttacggtcaaagctaacaataggaaactttatttttagtccttttttaggaatcttaataggagagctggtgatcagtccagcgatttccttttgtttaaatcgctctaaatagtaattaatatcttgggattgatagtgatctagatgaagaatacaatcgtatcctttttcctgtaaataaaaggctagatattcaaataattcagaataaaaaggattattaatttttggaaaatcaacctcaattaaatttaatttagatgtagtattgactgtattttttgttttgtagcctaatttttttattgcttctttaaccttaagagcagattcaatacctacatatccattttgattaatatatcttgaaactgttgctatcgaaacgtttgcttctttagctatatctttaatagtaactaccatattttttcacttccttatgtaaatattacacatttaaaatcctatatcatagtattttgatttatttaaatgtgtaaatttgtgtaaatccattgaaaactgtaaatagaagtgtatgatgtaattgtaaatatgatagcgcttacttaaagagagcgatatttgatcaagaggagtgaagatttatgaaaaagtggctaaaaagaatagctttaattagcttagtcgctacgatggctttaagtttgacagcttgtggtcaaaataaaagcagcaattctggtaaaaaagtgacaattgagtactttaaccagaaaaaagaaatgtcagcaactttgaaagaaattatcaaagactttgaaaagaaaaatcctgatattcatgtcaaagaagttgacgttcctaatgcaggtacggttttgaagacaagaatgctttcaggagatgttcctgatgtaattaatatttacctacaaaatattgattttcaagaatgggcaaaagcaggttattttgaagatatgactcatgcttcatatattaaaaacattaaaaatcactatgctgattcttttaaaattaacggtaagatttacaacgcaccacttagtgccaacgtttacggtttcttctataatgcaactgaatttaagagattaggaattaaagctcctaagacttgggccgaatttgaacaaattgttaaaaaaatcaaggctagtggcaaggcaccatttgctgtagctggtactgagccttggactttaaacggatatcaccagttatctttagctactgttacaggtggtgctaagcaagctaaccaattacttaggttctcagcgcctaacggcattaaagtaaacaatccttatgttcaaaaagattttactagattgaacttacttcgtgaaaatacacaacaaaattggcgtggtgctagttacaagaaactgtcaaatcttttgtgtaaatagttctttctcgtaaattgattttttaattatttatttaatcaaagtaagattctaaggtgtcctgaacctgaccaaagcctttatgaattcgattgaaataacggtcattgtagctcattgcctgaatgccaataaaagcatcaagcgactgttcagttggaaactctgccttaggcttagctttgcgcttgatcacattgttaaatgattcaatcatgttagtcgaataaattgaagctctgatctgcttgggatagttataaaagaccagcagatctggttctatgtctttcaagcttctgataacatggctgtaaaccttgccccatttggtatagaagtcatgcaggacagctgtggcttcttctttgtttgtctgttgatgcacctgtttgaattcgttcatgatcttttcacgatcgtcgacgcgtactttagcgcagatattgcgcatgacatgaaccaaacagcgttgaaaatgagctttaggataagtcctggccaaggctgttttcatgccaacaacaccatcagaaagaaaaagctcaacttgctttaagcctcgggatttcatgttttgaagcatatctgtccagacttcaatgttctcgctaggtgcaatgcagtagtcaatgacctccttgtgcccattaggcttgatgccaatggcaatatagactgcttcacgctcaaatgtttctcggcgcaaaggaaggtatgtcgcatccaaatagacgcagaaaaacttgtcgcttagcttgcgtttgtggtaagcctcaacctttggaatcatctgcttggaaatatttgatacctgagctggactgtaatggctgccatacatcttttcaattagatcggctatttccctggtggtcacgcccttggagtaaagcttgataatcatgctttccaagatatccgagtgctgcttgtagccaggcagcgtgtgctgatgaaattgaccgttgcgatcccgaggcacttgcacttcaattgggccaaattgcgtatcaactttgcggaaataagcaccatttctagagttgccagtattccagccatttctggcatagggatcatagcccagaaaggcggtcaattcagcttctaacaagttattaacagcctgttgtagctctttgcgcaataaatcatttattttgtctggattgaatagagcttgagcaaaatctttggtaaaatcattcatgaaggagttcttctttctgtatgtgtttttttgttcaaaccaatcatacgagaaaggaacccctttttctaatgtttaaagaaataaatttaaggaatcattcatccttacacaaactattttacagtctccaactttagataaattacttgatcaaatgatgacgcaatttgagcagttaaataaaaattatgaaaaaggacatggagaacgtctctatgaacatttacgtggtcgggtaaaaagtgaagccagtatggaaggcaagtgcaaaagaaaagatttaccgttaacgccacaatcagctttgcgtgctaatcgagatagtgttggattgcgtgttgtctgcaattttattgacgatatttatacctgtattgactttattaagcagtgggataatgttaatgtttatcaggaaaaagattatattactaatgctaaaactaatgggtatcgttcatatcatatgatttttgacgtgactgtacctgatgaagatgttgacggcaatataccgggtcattattttgttgaagtgcagctaagaactatcgccatggatacttgggcaagtctagaacatgaaatgaaatacaagcacaagattaagaatcctgagatgattggcgaagaattaaaaagagtagcagatgaattagcttcttgtgatgtatcaatgcagacgattcgacaattaattagggaagaggattagtaaattaatgaaaattttagtagcagaagatgaaccacagctattgcgtgttttaaccgttgccatggaacatgctggttatgatgttgatccagtggacaatggactaaaggcagtagaacatgctaaagaaaattcttatgacgtaattatgttagatatcatgatgccagtcatggatggaattactgctttgaaaaagatccgtgagagtggcgacaagacttatattttaatgttgaccgctaaggccgaggttgatgaccgagtaactgggcttgatagtggtgctgatgattatttgactaagccgttttcacttaaggaattgctagcacggctgcgttcaaaagaacgtcgagaagatgattttacacctaataaattggaattaggggatgtaactttaaatgtatctaagcaagagttagttagtcataactcaattcgtttgagcggaactgagactcagttgatgaattattttttattaaatcaaaataaggaattatcaacggaagaattgcttaatcatgtttggaaaaatgatattgatgcaaacgctgatgtagtttggatttatatttcatacttgcgacaaaaactgcaatcaattcaaagttcagttcgaattgaaggcgataagggtgactcgtataagttagttaagtaggtgagcagatgattcaaaaatttcgttggaagtttattggtacttctgttgctgccttatttgtagtcctattgttgaccttaggcggcttagtttgggtgactcatgttcaaagtcaaaatgaagtagatcgggtgctgacagctttagttaaaaatgaaggacgtttatcacctaaaaatgccaagccagcttttggtgaccaacgcgatccaattaatcgcaattttttaggtgggcaatataatcctgaagcggtttatcagtatcgctattttgcagtaatgattgatgaaagtcatcgcgtacatgtgatcaacgataataatgtttacaaggttaataattctaagattcagaatattaccagagcagctttagaaaatggagacaaaagcggtgtagtcgccctagggcaaaatcaatatgccttcagagttgctaaaaattctactggtgaaacgatgattgtctttttaaatgagaccctaatttttaatcgtttttggttattattcagggtagctttagttttaggattaggagctttgattgtcttcgctttagttttgattttagttttaggtaaagcaatcaagcctactgttgatgcttatcataagcagcaggagtttattactaatgctggtcatgaattaaaaacaccattaagcgaatacagaaatggaagagatgcttggcaataattctgaatggaatgaaagcaataaagagcaagtagcaaaattaaccaaattaattaatcgtttgatttcgttagctcgtaccggcgagatgggtgaacttaccttaagtaaaattgatttttcaaaaattgttgaagaaacgactaaagattttaaatcagtcatgaagaagaatgacttagtttatcaagtatcggtgcgtgaagggctgaatgttttagctgaaaaacatactttagctgagatagttaacatcctattggacaatgcccagaaatattgtgatcctcatggcaagattcaggtaaaattgactaaaggtggtaccttaagtaaatatgcagttttgcgggtagaaaatacttatcgtgaaggtaaaggcaaagactatagtcatttctttgatcgcttttatcgtgatgataagtcacataattctaagaaaggtggctttggcattggtctagccatggcacaagaattagtggaagcttttcatggtaaaatttcggcccaccataaaggtgaagacattgtttttactgttagtttaaaaattgctaaatgattattctgtgatagttgtataattagaacagaattgggggatcattttggcgaagagaaaatcaatttataccaaagatgttgtcctggttatggcagcatctttcttttttatgtttagtacaatgtttgttaatctaatggatatgctaaagaattaggcgctagcagtgcttttgctggaatcattgtcgggattatgagtttagcagcaatgtttttgcgaccggtagctggcaatttaaccgataaattttctaaataccgcttatcgtttattggcggcgctttaatttttgtaggagtaatgggctacgttttgactccgtcaagtggttggcttttgctctttaggttaattaacggcaccggttatgtcctgtgcacagtttgtatgactacctggcttgcttttttagtgccgcgccaacatgttggtgaagcaatgggcttttatggtttaatgaatgctttggcaatggcgttagctccagcagtttcgattaatatttatcaaaaaataggttatcgaacaagtttggtggcatcagctgtttcagctttactaatgattgtagcaattcagtttgtgggtgataatgctttgcctaaaaagcgcgtccgaacgcagaaaaagagtttcaaaattattcaatttaatgtcctaccggtggcaattttgacaactttatttgctatcccgtattttgtaacacaggcagatattgtaacttatgtagaacaaaaacatctgactgtcgcagttggatcatatttcttgatctatgcggttgttttgttgattattagagtaggactaaaaaggtattttgatacagtacgttttggcgtctggttttggctaagtctagtttcaacggctacttatattatcttgctcgcaataatgaataatgattggcaaatggctttagcggcagctttaatggcgtcaggctatgggatcatttattcagttttgcaatcaactgcgctgttgttagcaccgattgaagaacaaggcttagctagtgctactttttatttaggattagatattgctatggcctttggcccgatgatcagtggtgtaattgattctgctttaccgatagaatggttctatccagtagaattagtcttagttccattgattttagtagtttatttcatttggcgtaagcgtttgaatggcgcaattgaccatcattagagggaaaatatgagcgaatatgtagttaaatctaagttagaagataaagaatggcaaattgccaaccaagtacgtgatcatgtttttgtttgtgatgatgttaaacatgatgcaggtcccaacccagttgagtatctatgtggtagtgttaattcatgtattgtgatgtcggcagggatgattactaaagcacatcaacttgatgttaaaaattttagggtagaaaatcaggcacaaacggagaatctgggccatggtaaatcagtagtaactgagatgaagatcaaggtcttctttgattcgacaatgactagagccgagaaggaagaatttttagctcacactttgcatgtttcaactgtttatcaaactattaaagcagctgtcaaaatttatgtggaattaggagaataagcgatgagcgagccatattacaaacaagaataccagggtgaaagaaagttagatggtgaggccccagtttttagttttgatcaaattatgaaaaaaacttttctgcgaccatttatctggaatgcaagaactaccagaagaagtttctggattggaatcgttattactgaagttataatttggattggtggaattattacatttttggcaactgttatgccagtttctcactatgagaatgattcagctgatatgataaatggttttgcttttaatggtgatcacgcttcgatgattgtcattatcggcatgatcatttggggcttgatctatctttatttgaaattatgccaattaggcctagccgtaagaagattgcatgatatcaattatacaggttggcggattctgttaatgctgataccgttaggttggatttttgttctgtattttgcaattcagccaagtaaacaagagccggtgaaatggggaacgtatctttaccttgacgaataataaaaaaatgttataattgaactataagagattacgttaggagattatttcgatgaaaactaagaatttatttacttcattagctgccgcagtgatgctttcagctggtttagctggtgcaggtgtgtctgctgcagaaccagttcatgcagcaactacacaaacttcaagcaaaaaaggtaccattagtattaagcgtagatcagtatcagctacagttaataatgctaatcctaagctttacgctgtaaaccaagatggtaaaatcgtaaagtcaatggattcaaattatactaaaggtcaaaccatccagctttacttctctaacgaggctaagaacgatcaaggttctgttactttctattatgttgacagtcaaactgtagatggacaacaatgtgcaatttatgttgtttcgactgatgttaccccttcagcaacagttccaagtcaagcagactggtacaagcaagcacaaagtgaccaaaaagccattcaagatgcttacaataatagagcattaaagtacatcgttgtttcacctaagtcaaaaaagggtgcaaagatctactacgcatataagaagagtgctaaggctaaaaaggtttactttaaggcaaccaagaagaagatcaagtacggtaagaagtacaagtcatcgatgatcgttaaaaacggtaagagcagatatgcttatattggtaagaagagatacttaaagacctctactattaaagtagtaagtgctaagtacgcaccagttcaattatcagatgatttgaagaacttaattgttcaaaactagaaaaagttaataaaaattgtagcgtaaaggatgaattattgtcctttacgcttttttgatctaaaaattaataataatattgataaaaaatctcactgacctacaatagactttgcgttatttttagggagttgtaaaaataagaatgaagagagtaaaagtctatttaggattagcttgtttgatgacgttattatgtttgaagccgcaagtggtttgggctcgagaactaaatccatttcagactaagatgattaatccgcatacgtcttatagaatttatcaaaacttaactcgtaaaggtccgtcaagaagtctatgccttgctaatacgtttaaacatggcaatgttcaagccagtgcagttagaaaagttcgcggcaataagtattgctatgtttggttagacggacatagaggcggttgggtcaatcagcgagcttttttaagaagaaaaattgcagttgtacatcagattagtttagtgaagaattcgcattatagttttccaactagggatgcgattaattatgcaacagatgcagcaggaacggtaattgagccaagtaaagttaaagtatctcgagcagaagtttcatcaagtaaaaaggaaagctatcgggtaagttattcttatggtaaagctcatgctcagacagttgttcaagtgagagctaatgctagagagggcattgttaaagcaaccaaaaaaaccacaagctggagacagtgctcgtagctggttcaagcactataagacgtctggtaattggggtagaagctttgctccggaaactagaccgcatgttttgaaaagtggacattttagactgaaaacctatttctatcaacctgcgactttatgtcaaagtgattcggtaactggaacggtgggaccagtaccagaagggcttactgtatcaaatggttcaatgtatgccacaatgtatcattcacctaatgatacgcgtgctcacattgtttcttacaaatttaatcaagtgcctaatcgctatactatgcaaaagttgccatggctaccttggtcacaatttctgcggcttgtatcccatgttaagacaagcccatatattaaattgggacatggacaagcaatcggttcaactcgaaagtatatttatgtgattgctaataaccatttattgcgcaagagctctcaatcagaagaaattatgcagattagtaaaaacaatttgcaaattaaacagatttggacttttaaagtttggaatcattcagctagaacaggtcgttatttccataatgctacttttgtaaatgatcaccaatttattgccgtttaccgtgatgccacagaccaccgttttgaatattgggaagttactcgtcagggtaatagttggtatcctaaagagattggcgctactagaggagattttatgcgcaatgattctcccgttcaaggaattacctatgacaagcataaaaaacagatttatttggcctttaatgattatttgtttaaattgaaacgctcaggtaaagtgctggctagaggtcactttcatacagggcgtgaatttgaggggattagcataaatggtcgtcatttatacgcagagctggcgcaaaggccagaattgttgaggcagaggataagataataggtgtaaaaatatgttatacccagataaattctatttaacacaagatttaaatagaagatttgccagaactaaccttgctcgactaatatttagtgatttgcattttgagaaaacaaatatttctttaattcaaacacaattagttgctgatgggttaaatatagagagggcttccgagaaagataaggaaagaattattcgattaaaacgagcatggcaatatattattaatgaaaataaggtgttatctttagatattgaactaaagatacatttattactgacaggctatggcttccgagataatctaaactacaaacaagaagaaaaatttttcgatgagttaatgaacaacgatacctcgactacagataaggcaatgacattgatgtatcataatatgcgtaatcaattattctggggcggaaataagcgtactgccacactagctgcaaataaattaatgattgaccatggagcaggtttaattaatgccccacttgataagtgggatagatggaacaagctgattagtcaatattatttaaccggcaaaatgaatatgttaaaagattggacctatgaaaatggcattcaaggagtagtgctgaataataattcagatttacctaaacctgatattaatccagaagattatgattaattacttaagcagaccgaataggcctgctttttttgtgtgcaaaagctctttttgaaaatatcatgataaaagttcataatagaaattgtttgtttatgttaaaggagttgttttattttttatgaagaataatgatcacgttaagataagtcctagtagtcttgtcttgatgattttttcttctatttttggatttagtaattcactgacagctttttatcaaatgggttattcaagtatcatttggtatattgtcacagctattttattcttcctgccatcagccttaattttcgctgaatatggtgcttcctttaaaggaattaaaggtggaatcttttcatggcttgaaggatctactaatgaaaaagtatcatttatcggaacttttatttggctggcagcttgggtaatttggttagtttcatcaacccaatttttcttagtttcagtttcaacggcaatttttggtcatgatactaccccaagctggcatttagggtcgctgacttcaactcagttattaggtgtgttggaagttattttcttagtaattgttacattttgtgccgcaaagggaattgataaaataaaggcgattaataatattggtgggatctttactttaggaattgccattggttttacagcagtttcactttttgtctttattttgaatcatgggcaattagctgaaccagtgaccgcacaaaatatggttcattcacctaatccagcatttcagtcaccgattgcggttatttcatttattgtctatgctttatttgcctatggtggtctggaaacaacctcaggagtaattgattcagttgataaaccggaaaagaattatcctaaggctctgattacggccatggtcttaatgacagcactttatgttgtaaacatctttatgtgtggggtggctgttaattggaacaaatcgttaggtggtaaaggtgttgacttagctaatgtcgaatatgttttgattaataatttaggtattgtcactggtcatagcctaggtctatcacattctacttcactggcaattggaactgtcttttctcgtttggccggaattgcggatgtgttatcaggaattgccgctgcctttttgatggtttattcaccgattaaatcatttattgaggggtgtgatccgcgactattgcctaagaaaatggttaagttaaataagcacaatatgcctgaattctcgatgtgggtacaagcaattgtggttagcgttattatcttatttatttcatttggtggtaatggagcacaacaattctatacaattttaatggatatgatgaatgtttcttcatcagcaccatatttatttttaattgctgcttacccattttttaaagctaaaaaagacttagatcggccatttgtttttattgaaggtaagaaaaaagtttgggcaacgacaattgttgtttggttagtggttgcggtcggaattatctttacttgtatagaaccactctttaccggagactggcaaacttcattctggacggctattggtccagtggcctttggtgttattgcttggatttattacgcatataatgaacgaaaagaaaaagcaatggcttaatacgcaaaataagacgaaggattttgtccttcgtcttatttcttttctctattttttactttaagccagctactctgacaacatcacgttcaatcattaattcctcattagttggaataaccataccaacaatagttgagtcgggcttggtaataatggtggcattttctttattagcggctgaatcaggcttaaggcctaaaagttcgagtgaatccatgacatgttcacggacaccaaagtcgtgttcaccgacaccagctgtaaaggcgataccatctaggccacgcatttcaagggtataagcaccaacatagcgaatgattcgattaatgaaaatgtttctagctaagtcagcacgcttcttcttttccccttcgagcttagtcatgtcaccacgtaaatcacgcatatctggtgaaatgcctgaaattcctaacaaaccagattcgttgtttagaaccttaagcatttgatcagcatcaagattttcctttttcatgacaaaagcaagtaaagaaggatcaacatcacctgaacgggaactcatcgtaatacccgccattggtgaaaagcccattgaagtatcgaatgatttaccatctttcacagcggtaactgaagcaccagatcctaagtgacaaacgattaatttcaagtcctttaagtcgcgtttcataatttcagcggctttttgactaacatatctaaccgaagtgccatgtgcgccatattttcttgcaccgtatttttcatagtatttatatggaagtgagtacaagtagtgcactggatccaaggtttggtggaatgaagtatcaaagacagcgacttcagggacgccaggcaatactttcatgaaggcattaatgacatcggcttcagcggtattatgaagcggcgcatattgtttcaaatcataaatcttttgtagtgacttttcatcaattaaggtggagtccttaaattcttcaccacccgcaacaattcgatgtccgattccgatgatttctttaggatcgtcaattaaatcatacttttttaaattttcaagcaagattgtaacggcagtttcggaatcaggaatgtcaactttttcttggtgtttttcacctttaaccttgattgtaaaggtggagccgttaagcccaactcgatcagccatcccttcgctgataactttttcatcaggaaaggtgaaaagcttaaatttaaaagaagagctacccgaattaatcgctaaaatttttttcataaattatgcctctttttcttaatttttgcagtgcaacctatccagtaagggcatgcaataaagaaaatgccactaatctgctttaagtaagttcttgcagtaatagtgtcaacgtctttattatacaacttttgctgtaagctcttacagatatgaaactgtcaaatcttttgtgtaaatagatctttctcgtaaattgattttttaattatttatttaatcaaagtaggattctaaggtgtcctgaacctgaccaaagcctttatgaattcgattgaaataacggtcattgtagctcattgcctgaatgccaataaaagcatcaagcgactgttcagttggaaactctgccttaggcttagctttgcgcttgatcacattgttaaatgattcaatcatgttagtcgaataaattgaagctctgatctgcttgggatagttataaaagaccagcagatctggttctatgtctttcaagcttctgataacatggctgtaaaccttgccccatttggtatagaagtcatgcaggacagctgtggcttcttctttgtttgtctgttgatgcacctgtttgaattcgttcatgatcttttcacgatcgtcgacgcgtactttagcgcagatattgcgcatgacatgaaccaaacagcgttgaaaatgagctttaggataagtcctggccaaggctgttttcatgccaacaacaccatcagaaagaaaaagctcaacttgctttaagcctcgggatttcatgttttgaagcatatctgtccagacttcaatgttctcgctaggtgcaatgcagtagtcaatgacctccttgtgcccattaggcttgatgccaatggcaatatagactgcttcacgctcaaatgtttctcggcgcaaaggaaggtatgtcgcatccaaatagacgcagaaaaacttgtcgcttagcttgcgtttgtggtaagcctcaacctttggaatcatctgcttggaaatatttgatacctgagctggactgtaatggctgccatacatcttttcaattagatcggctatttccctggtggtcacgcccttggagtaaagcttgataatcatgctttccaagatatccgagtgctgcttgtagccaggcagcgtgtgctgatgaaattgaccgttgcgatcccgaggcacttgcacttcaattgggccaaattgcgtatcaactttgcggaaataagcaccatttctagagttgccagtattccagccatttctggcatagggatcatagcccagaaaggcagtcaattcagcttctaacaagttattaacagcctgttgtagctctttgcgcaataaatcatttattttgtctggattgaatagagcttgagcaaaatctttggtaaaatcattcatgaaggagttcttctttctgtatgtgtttttttgttcaaaccaatcatacgagaaaggaactcctttttctaatgtttaaagaaataaatttaaggaatcattcatccttacacaaactattttacagtctcacagatatttttttattactaaaatttatatataaatttgattgatcatatataaatttagaatatcaatttgcaacaaaaccgcttacaaactataatgaaattaacatacaatatatattgagaggagaaaaacgaatgacccactactacgaaggctttccacaaagtgaccgcgatgaaaaaatcaagatggtgaatgtggatgaacttgaagaacgtgttaagaaggtaatgccagaaggtgcatattattatattgcttcgggtgcagaaaatgaatggacctggcgtaacaatactgctgcttttaatcattttcaaattgtacctcgtgctttgactgagatggctgatccgcaaactgatactgattttatggggatgcacttaaagacgccaattatgatcgctccaattgcttgtcatggaattgcacataaagatgcggaagtcgcaacgcaaaagggtgctgctatggctggtgcgctctttagttctagtacttatgctaataagagtgtagaagaaattgcagctgcagctccagaagcaccaaggtttttccaactttatttgagtaaagactggaattttaatcagatggtttttgatgcaattaaaaaagctggttatcaaggcattttcttaaccgttgatgctttggtatcaggttatcgtgaagcaaacttgcggactaactttacttatcctgtaccattggacttctttaagcgttaccttggtgcaaaaggtaaaggtcaaagcgtagctcaaatgtacgcttcttctgcgcaaaagattggtcctgaagatgttaaaagaattaagaaagaatcaggtttgccagtctttgttaaaggtgttatgtgtgctgaagatgcctataaagcaattggagccggtgctgatggaatttacgtaactaatcatggtggtcgtgaagttgatggtgctcctgctaccattgatgttttgccagaaattgcgcaagcagtaaatcatcgggtgccaattatctttgattcaggtgtccgtcgtggctctcatatctttaaagctttggctttgggtgctgacattgttggaatcggttgcccatatctttatggtttagccttaggtggtgcgcatggagttgcttcagttattgaacaattaaatgatgaattaaagattgatatgcaattaacgggatgcaagacaattgatgatgttaagcatgctaaattgacgcacattgcttatactgctgataatttgccatctaatactgatccaagcagacgcaaggaatatccggtaactgacgaaaatcaagttaagcaaactgatgcggtatctggtgcttctaagttagaaggaaagccagctccggaaccagagactgataccacaactggtgcttcagtaagataaagcaaaaatataattaatattttcaatatgattgtcattgaataaatgatagtcatatttttttactatcaagaactcagcggctacaatcaaggtgaaagcgattcgatttttggagaggaaaattaaattattgaagagaataatgttttgactgatactgaagagcttaaaatcttgagtgatcttgttgcaataaaatccgttaatgataatgaaattttagtagcaaaatatttacaaaaactattaggagaacatggaattagttcacgtttgttggaatattccacaactcgcgcagatttatttgctgaaatcggaacaggccatcccattttagcaatttgtggtcacatggatgttgtttcaccaggtgaattagatcaatggcatactgatccctttaaattaaccaataaggatggtaaattgtacggccgcggagcgactgatatgaagtctggtttagctgccttggttattgccatgattaatattcatgaacaccatttaattaagcatggtagtatcaggctgctagctacttttggttggtgaaccttctggctacagtattgccattgctcataagggttcgatggatactaagttaacttcccaaggcaaggaagctcatagctcaatgcctgaaaagggttataatgcgatcgatccattaatggatttattagttaaggccaacaaggcttttagagaaacagataaaaacaatccagacttaggtaagttgacgttcaatactactgtttttactggcggggaacaggtcaacatgattcccggagaggctaccgcgcaaattaatgtgcggactattcctgagttcaataatagtttggttgaaaagaaattaactgaattagttaaggcagaaaatgcgcaaggagctaaaatcaaaatgtacatctatatgtcggaaccttcaattaaaactgacggtaagtctgaatttgtaaaattagcccaaaaaattggagcaaaatatgcggaaaagccgattccaacagttgctattaaaccagtaactgatgcttcgaatttgattgccgacaaaggacctagctatccgtttgccatgtttggtcccggtaatgacacgccgcaccaagttaacgaatatgttgatgaaaagatgtatttgaactttgtgaagatctatactgaattgtttgtggcctatttgaataaataatttggaaagtaataaagagcctaggcaaaattttagcctagacttttttattgtattttgaagtattctttagccgcatcactcatccgttcaggggtccaaacaggataccagacaaattctacatcaacatttttaacttcagggacttttttaacggctgttgtaatctgcttgatcaaataatcagtcaaaggacaggcaggtgtagttaatgtcatattgatgagacagatcccatcttgatcgaggtcaatttcataaatcagccccaagttgaccacatcgacgtttaattctgggtcaataacttgagctaaatgttcaataatatcgtttttaattgttttgctatcacgcattgtgttacctacgcatctttaccaaaaatttttgctttaattgcttgacctgttggtgtaccagctaaaccgccgattccagtttcacgcagagatgccggcatttgatgaccaactttcttcattgcttcaatacattcatcagctgggattacacttgtacatcccgctagcgccatatcagctgcgataagtgcattaccagcgccaataccatttcttttgacgcagggaacttcaaccaaaccggcaatcggatcacagactaacccaagcaagttagacatcgcaatcgataaagcttgggcactttgttcagcactgccaccagctacttcaactgccgcggcagcacccatggctgaggcactaccgacttctgcttgacagccgccagttgcccccgcaatttcggcattattggcaatcaccatgccaaaaccgccagcagtaaaaagaaagcgaatcatttgctcttcgctgagctgtaatcttttttctaataaaaatagaacgccaggtaaagtgccggaagaaccagccgtcggggtagcgcagacaacgcccatcgctgcattgacttcgttagtggctatggcattttcaactgctgccatcattgtatcgcctgaaagtgtgtgtcctttctcgcgatattttttcagcttaattgcttcgccaccagttaagccagtttttgaaaagacaccgtttccagattcacctcttttaacggcagctcgcatagtttgcaagttatatttcatgcgctgccagactttttctcgtggcaagcctgatagttgacattcttgttcaataattaattcagaaataggtttgtgcgttttttctgctgcagcaacaatttccttaatatggttatacataatattgccctatgttataaacaaataatattctcaaattttttatttagttcttgcaataaatcaggatgaagataattttctacatcatattcataaatattatagtttttagtatgaaaaattcgtttgcgactaaagggtgctttttcgtgtaagagcgcggtaagctcttgttcaatgcgaatatttttgtgtggatcaactaaaataataataggtaatgcaccagcaggttgaatctcggtattatgtaagacaattttgcgaatttcaattgcaccaccaccgatagagcatccagccaattccactttctttttatcattagacatatttaaaatagcagtattagggtgaccaattgggctaggaccatcttcttcaacaaaacgtaaatctacgccgcgctggcgtgcaatctcaggtgcctttggtacgcgtagatcgtctgagtcaaagcctaaaatacctgccgcaatagcatagtctgttccatgaccacggtgagtttgggcgaaagagtcgtaataatgaacggtaactttactcggggtaccgccaaaaagtttgtaaccagcgcgtccaatagcgacggctccggccgtatgtgaacttgatggtcccaccattacggggccaataatgtcaaaaacacttttataccgattagtcattttaatccctgctttgtaagttattctgtttttaattataacgaataataaagaagattaagaaagttttttgcaattttaaccgaagttttgtcataataatatgaaaagtgaaagaggttggttaaatgactaaagaaaaagcagaattaaaacaaaatttggagcatctagctgagcaaaagggcagccagcaggcagtttcttatcaagacttgtttacaccacaattgatgcaaaagtatactagttttgctactattgacttttttgtcagagaattgggcgtgaaagactttacgcaaattgagcagatggcgatagatcaagtcgatgaatttgttaaaaaagagaccaagtttgctagctgggaagaaatgcaacaaaaggcggttagcgagtacatgatgaagttattttagcaacaaaaagcgagttagtattaactttaaaactaactcgctcttttatttactatgttaggtgaatgacttgagcacctaattcatcaataaagcgctgatcatgttcaattactagcatagtaggatgatattttttaattaattgaataatttgttcttggttaaagacatctaaatagttcaaaggctcatcccaaagatacaaatttgctggttcaagtaaggacttggctaagtagatctttttttgttggcctgaagacatttgattaattgaattagtgaatatatcacgttcagtacctaatttgtgtaagatattgagaaaatcggcatagttaaggtggtgcttttgggcaaaatcttttaatgataggttattagattgttcaatctgtgataaataggagattgaaatcttatcagctgaatgcaatttgccagtaattgttccagcaaaagtattagtaattgccttaaacaaactagattttcctataccgtttttaccagtaatcacaatttggtgaccacgcattaaatcaaaggtagtaggttggaaaaggggaagcttgtcataagcaaggctaactcctttagcagtaattagatgtttatgatggtcggggacaaaattcatagctaggtcattgtctgcttcaatattttttaaaagaccttttctttcttcgatatttttatctaatcttgcttctacatttttggcaagtttcatttttttggcggctttgtgtcccatgaatcctttatcgtaaactgtacttctatgtcgaatatcgcctttcatcttggctcccgcatttttgttgctttcggaacgctgggcaaaagtttgcatcttttgttgactggcatggagatttttaatttgcttttctaactttgcattataagcgatattagattcatcctctaattccttttgtttttcataacgagtatagtttccttgttccagcctaattttttgcatttcaattgctagggtgtgatcgacaactttatctacaaaatttcggtcatggctgattacaattaatccttgttttttattatgcagatattgtgctacttgatttcgtgtatcttcatcgaggtgattcgttggttcatctagtagggcaaaagaatgttgattaataaaacaaagcgccagtaaaatttttgtttgttcaccgccactaagtgttgaaaagggctgccaaatgatattttctttagcatgaagcagatttaattctcgttttaactcccattcctcgaaattaaactgttcttgtaaagcataaatagtaaggttatcgggattattaattacctgaggatagtaattgaattctaaatcactttgaatagttccttgatattcgacctgttttagcaacattttcataaaagtggttttgccgcgaccattacgaccgattaagccaagtttccaattagaatcgagatttaggtttaaattatcaaaaattttatcctgaccgtcataggcaaatgaaacgttttttagtgaaattgtagacataaaaaagcaccgtcctctcaaactgtgcttatgatctgagaaaatggtgcctgatagattagtccaagttggctaatctataattattcttaatttaaattaaagaaaatcacgcagactaatttctgatcacaagcaaaaagtacatccttaaactagtagaatgcattattttttacttaacgaaaatcagaaattaaaaacgcatcggcgtgagtcctcctattacttgaattgattaatctggcaatactttaccatcaaatataattatttgtcaatatttttatgataattcatttgcaagctgtgattaataaggagactgtaaaatagtttgtgtaaggatgaatgattccttaaatttatttctttaaacattagaaaaaggagttcctttctcgtatgattggtttgaacaaaaaaacacatacagaaagaagaactccttcatgaatgattttacccaaaatatggcacaagctctattcaatcaagacaaaataaacgatttattgcgcaaagaactccagcaagcagttaatgacttattagaggctgaactgactgcgtttttaggctatgatccttatgccagaaatggctggaatacaggcaattcacgcaatggtgcttattttcgcaaggttgatacgcaatttggcgagattgaaattcaggtgcctagggatcgaaacggcatgtttcatcagcacacgctccctgactacaagcagcactccaatgtcttggaaagcatgattatcaagctatattccaaaggcgtaaccactagagaaatagccgacttgattgaaaagatgtatggcagtcattacagcccagctcaggtatctaacatctccaagcagatgattccaaaagtcgaggcctatcatcagcgcaaactcagtgacaagttcttctgcgtttatttggacgctacctacattcctttgcgccgagaaacgtttgagcgtgaagcagtctatattgccattggcatcaagcctaatggtcacaaggaagtcatcgattaccgcattgctcccagcgaaaacgtcgagaattggacgggaatgcttcaagacatgaagtctcgcggtctagaacaggtttagctctttctttcagatggcgttgtgggcatgaagacagtgctggagcagacttatccgaaagctcattttcaacgctgtctagttcatgtcatgcgcaatatttgcgctaaagtatgcgtagatgatcgcgaaacgatcatgaatgaattcaagcaaattcatcaacagccaaataaggaagccgcgatcaaagtcttgcacgctttctataacaagtggaacagagcgtacaaccatgtcatcagaaatctcaaagagattgaacctgatctgctagtcttttacagctatcctaagcagatcagggcttcaatttactctaccaatatgatcgaatcctttaacaacgttatcaagcgtaaagctaagcctaaagcagagtttccaactgaacagtcgcttaatacttttattggcattcaggcaatgagctacaatgaccgttatttcaatcgaatccacaaaggctttgatcaggttcaggataccttagaatcctactttgattaaataaaagattaaaaaatcaatctacgagaaaaatctatttacacaaaaaatttgacagtttcagattaaatttcttcactacttaattcaaacatattaataattgatttaaacatagataaaagttgtttaactattaaaaatgaattttgtgaatataatgttatcgataacagaaatcatttttatattgcaaatgaaagcgcatacgtttattgttgaatttgaaaaaacatgattttgtggaggaatttatttatgaataaaaagagtggtcataatatcaaatttaaatcaatttttgtatgtacttcagctattatgagtctttggttaggggcaaacttaactacgactcaagttcatgctgcagaagacaatgcagctcctaaaagttcagaagttgtaggccaaacgaattctagcaaagataatgcagctactgctactgtacaaaatcaaagtaacgcaaaagcaaagcagcgtcaacaaggtgtagctcctcaaaacgttcctacagttttggcagccaaaactaaagatgagggaacaaataactctccagcacgtgaggaagttaaagatcagactaaagtagttattcactacaatggtgatggtgaaaaatgggttccttatatttggggtaagaaacctaatggtaacggcaatgaatacaaatgggccggcaaagatgataatgggtattactcggttattgatttagataaaaactatgaccaagtaggagttttaattaaaaccaaaggcagttgggctggtaaagacggtacaggtgctgatcgtagcttaaatgttagcgataatggcaaagcggaagtcttctataaagcaggtagtgatgatgcccaaaaggtaacaccagagtaccattccgcaaatataaatttgcattattacggtgatgaccaagttaataaggttaatgtttggacagataaggatcaagataataaacaacttattagcttaaccaaacaaggcaatagtcaagatggctcaatcaaattagacaatactgattttaataaactttttgttgcgccagttggttctgatgaaataacaagagaattcactccgttaccgggtaataaggcgacagatatttatttagttaaaaatgatacagaagcttattatagcaagagttttgccttagctgatcaaagtctatcttctgcatatatgacttcaccagatagtttgactgttgaagcaggtaaggctactactgtcgataaaattaaaggaaaacttggtctgcgaaataatagtattgatcatattgaagcagtcgatgctaatactgatggtaaagcaaagaaatttattattcataccaaagcagatattgatattttaaaggataaccaagttggactagggatgaactttaaaaatgttgatatcggtccttatgttcgttccaaagcttttgacgataaatatgcctatgatggtgacgatctaggctgcacctatgatagtaaaaagacgcaaattaaactctgggctccaactgctaaagatgttgaattgaatttatatgatagtgttgataatagtgccaagcctacgaatgttattgctttgacaagaggcgatagaggtgtttggactggtattattaagggcgataaaaaaggctgggcttatgattttaagttaacttttggtaatggcaaaataacacagactgatgatccatattctaaagccgttactgtcaatggcgttagaagtgtaattgaagactacaataatatcaaaccgacagattttaaccgaatgccttcattctctaagccaactgatgcaatcgtttatgaaacttcaattcgtgactttagtagtgatcctaactcaggaattaaagataaaggtaagttcttagggatgattgaatcaggtaagacaccaactggacaagttactggtttagactatctcaaggcattaggcatcactcatgttcaaattatgccttcatatgatttcgctagcattgatgaaactaagagtttaaagaatcaatacaactggggttacgatccaaagaattatgatgtgcctgaaggatcatattcttctgatccaactaatccaactgctagaattatcgaaatgaaagaaatgattaatggcctgcataaagctggtattagggtcattatggacgtggtatacaaccatgtttataatcctcaagagcaagcttttgaattaacagtgccaggatattatttccgttacgatgctgataataataccacaagtgatagtggctgcggtaatgacattggtagtcaacgtaaaatggttcgcaagtacattgttgactcagtagtttactgggctaagaactacaatctagatggctttcgttttgatatcatgtccttactagatcgagagactatgaatgatgttagagctgctctagataagattgatcctggtattattacttatggtgaaggctgggaagttggtaaccagaaatatactagagaagaaggaacgacccaatacactgcggataaagttcctaatgttggtttctttagtgatgatatgagaaactcggttaaaggtaatgatgatggctccgaaccaggattagtaattggtaacggtaatgaaagaaactttgataagcatgctgtcttgtttaccgatagttttttaagaggtaaatggttacataatgattcttgggagccacataactatgcaactccaagccaaatggttaattatgccgcttgtcatgatggtaagacgttgtatgattacatcaaggctgcaatgccaaatgaatcagatgagaatagtgccaggagagtaagattggctaactcaatgatcatgctttcacagggtatttctttcttccactcaggtcaagaagcattaagaactaaaggtggcaattcaaattcatataattcaccagtaaatattaatgaaattaattgggaaagagttggtgctaataaagcatcagtccaatatttccaaaaattggctaaattacgtaaacagctgccaattttgcatttgaatgatttcaataagatttatgacgagaatgttactaaaattattagttatggtagagaaaccaaagataaaaacatcaagggtgtatttgagtacgaatataatgttaatggcaagaagttattaattgtctttaatgtcaacaatgataaagttgctctaaataatgttgatttatcacatggtaagaaattgttagatagtgatggcaatgtgaaattaagtgataaaactatgctggcaccattaagtacacttgtagttgatgaagatggaacaatggttttaccagacgtgccaaaaccagatcagcctgtaagtccaaccactccaggtgataagccaggtaaaccaactacaccagaaaatccaaggattccggatcaaaagccagccaatccaattgttccgcaagaaacaattattacacctgaagctccaggtgaaaatagtattatagacaatactaaaaatataattaatggatcagaagagactactacagtttctactcaggataatacaaccactgaaatattattgacccataatgcttatgtgtatgacagtgaagcaaatcctatttatcaaaatgataacaagcttgtcttgaaagctggagatacaattaagcctttggataatggtaaaaagtatagtattaaaggtaagttgttctataaagtagctaaaaatcaatttgtcaaagttgctaatactgttagttactataagttagctcataactcattcgtttataataagcatggtaaagcagttaagaagaatggaaagcgcattttacttaagaagaataagcatatttcacttcattctgataaggtcgttaagattaaagggaagaaattctatcaattaaaagatggtagctttattaaggctagaaatgttaaaagaattggttagatttagatagttaattaaaaatattaaaaaacaagattgtttccaaaatgggcaatcctgtttttttaatcctgattaatcaagctaacgggcaaagtataaacactctccaatgataccgctggatcattaatttcgcaatctctttagtccgttgccgcgcactaattaaatgtgggaataggttctgaatcaattgtgtgccgtcaaatcctgtaattaacgattttttatttaaataatcgttgcattctttagccaataaagccgtaatgtcatccgtacaacaaatcgcatcgtaatcgttatctttcaaaaattgaaggatagcgattacgatgcgataattgattcacgggcgctaattgagcgtaaatcaaatttaacgtcaaaggtattaaacacacacatcatccctttgatacgatcactgattggataatagtcttctttggaaccagcaataatgattactttcttctttttttgctttaaaaccgactttgcaatttgcatctccgcatcatagttattcgactgcacagtagggatctgcggactaattacccggtcaaaactaaccaccggtagattaagcttgccactcttctttgaaatctgaattggcgagctggtaagtaagcctacgatctttttttgcttatatttatccaaataatactgcatatcttgctcttgataatgatctaaatgcaaaatgcaatcataacctttatcctgcaaaatagtagccaagtattcatacagttctgaatagaaaggattattgatttgcgaaaaattgatttcaattaagtttaattctgttttagcggaaattgcattcttgggtttataacccagttttttgatagcttcctttatttttaaagccgaatcaatgccaacgtaaccattctgattaagatatcgcgaaacggtggcaatagaaacgccggcttttttagctatttctttaatagttactgccatgttttacacctttatatgtaaatcctacacactttctatcagtaagtatagcatattctaaaacctgaattgtcaaattaagtgcaacagttaggctatgaggaaatatattgcttgaagagttcttctgctgtgtgatattgaaggattcgacgatgtttgcggttaatggcatcagttgcctgttgaacataagcagctgacttatctttcatgcttttgcctttagggaagaattgacgcagaagtccattgcagttctcattggtgcctctttcccatggagaatatgggtgggcgaagtagatctggcagcctttgatcttggtcatatccgcaaactcagagccattgtcaaacgtgatcgatttaaaccaggcaggatgtctgtcaatctcattttgaagcagcctttggcatgtgcttgcccgatagtcaggaatcttgataactacttcaaagcgtgtggttctttcggtcaaagtcattaaagcaggctgattcttgcgtctgacgcctttaaccagatctccttcccagtgcagcggcgtttttctgtcttcaatctctttaggacgctgttcaatggaattgccaagattcttcttgtgcaaagcatgaccgctatggccgtgatgacgcttgttcctgcgtcttttgagcttcataggcagatcaatattgcttatgtccagcaagccctgatcaatatagcgatagacggttggtgtgctgggacaagggtagcctggcatagtccttttgaattcaccaacgaattcatcaatgctggtggcatcaaatttagctttaaagcgtctggagagcattctcaaaaagacagcataatgcttcaatggattgcgctgatagcagtttttgcgacgcttctcataataaagctgtgcagtatcagcgtaatagtgctcatacaacaaatagctgctgtctctttgcaggacgcttccgcgtttgatttcgcgactgattgtcgacttatggcagccgacttcttgagcgataacagtacgggaagttatgccggaatccagcattgcttgaatttgtccacgttgtacgctggttaattgatgatagtgcttagaaatgctagaatttgaattggtcatgaagatcttcctttcttgatttttcgtcacttcaagtttaggtcttcatggcctttttgtttaacacttggtgttgcacttcaattttaaatccgggtccattattaattcctttcatagaaaactaaattccttttctaaaggggtcaagagctattatatacagttttctcagcagttacattcgcaaaaaagaaaaatgctaaatttatttaaaatatttagattttttatgcaataaggacaaatagctaggagaaagaacaaagaatatctccccatctattgatgtaacgctaaaacataatttactttctttgtaattttgtgtatactaaatatacacaaaaaagaaagaggcgtacaactatgactgtaaaattaagaaaagttggaaattcaaaaactttaacagttcctaaagatataataattactagtaaagagtatactgtgaaaaatgaggggatgaatatagtttttacacccgtcgtgaagaaaaagaaaaatatttttgcaaccaaagaatggcaaaattatgattatcaaaaagacatagaaaatgacgtggaactacaatcagtaaaaccagtgggacgtgaggtagttgattaatgatttatccgaaaaagggagatattgttaaagcagatgcagaacctcattccggacatgaaatgggtggccataatccgcataaaggtaatattagaagacattatgtggtaatgagtaccagtgcctataataaatcaacacatatgtttatagggatgccgattactacttcagataaatatcaaggcaacccacattacgagccaatattaattccaggcagtaatggcactggagtaaaaggttatgttgttttatggcaacttcagaattttgactttgaatctagaaatggagaaattgttaatcacgtaaatattcagctattagacaaacttcaaggtttcgtgaatgatatggtgggactagaataggtaaaacaattatgccaattttaaggctagttcgattatgctgagaggacgattctgaggtcaagttcgactgcagaggttaaaattaatcatttaatgcaatagaatgctaattcttatttttatgggaaattagcattcttttttgtactttctaactatgtagaataatgagattttattctacatagtacatctaatcatgcattattctgctactaagtgtataattttttacggtaagttgaataaataattaaaaaagcccaagtcctttgaatttggacttgagctcaaacaaaaagaccagtagtctgatgttaagaacaaaaaacacattagaagctggtcttttatgaattcaattgtaactgaaatcgcaaatattataaagtctgaagataattatattaagcgtgaaagaaaaataatctgtttcttcttaaacctgattaaggaaatcatggccttggctttagctaaagttgatgatgaaatgattaccaaggttaaagcacagggctatcagattgataagaagaatgagcgctcaatcaatatggcttttggcgaagttaggtatgtcagaagaagatatgtctgcccaggcaaacaagcaaggtatcccttggatgaattaatgggctttgacaaatacaagcgctacagtattttagcagtcaaaaacatcttagaagtaagcagcgttgccacttatcgcaatactgctctagcagtcaattgcctgtctggctttaatattagccatatgcaggtgggcaatttggtaaaaatggccgggaaaaatattaaagcgggccaagaagcagattcaagatatgatgccgcaggcactaagaaaaaggtcccagttttgtatcttgaaggcgatggcgtggtgatcaaaggcactaaaagccggttggaatttcatcgctatcaggtctgtgaaggcattgtcaatataagcaagaaacgcagaaagcgaatcaatgccaaggaatttgtttctttaagccgacttgatgcgctgaacgaagccaaggagtacctggccaatacttatgatctttctgatactgtaattcttagcaacgccgatggcggtgctggatatgccaaaacagacttcgatgacattgtagggctatgcaagcgtcatgagcatttcttggatgtctttcacctaaataagaaaatcaaagaaaggctatattttgcgcctgacctgcaaggcaagctgatttctgctttggaatacaaatacagctatgacaaagttaaaactatcctaaccactgcagaaagccgactaattgatgaattgaataccgagctcaatcatgattatctggggcgcctaaggaattatattgatcgtcattgggacgatattaagccgtttaagaaacgaaaactgactgtgactaaagccattggctgctgcgagagcaaccaccgcaagtatacctaccgtgttaaggggcaaggcaagaaatggtcaaaatctggagcagaaggcatgcttaggatcttaagctgcatcaagaatcgagagctggaattttggcttagcagcgagtttgaagattcagaaataactgtattgactgaacaggaattaaaagcagcggcccgtgacagcttaaagaagcgtcatgaagttcatttaggcatccagcatggcgcattaaccgcacaggtagctggcaatagttatttaagcaagctaagcagaaatttaagtcatataaatatttaagaaattaaggttagactaatggtttaaaggctaccgcaaaaacattgacacttacattctgctatgccaattttggggtgtgttgattatgtagtataattagctatagactaattattcaacatagagtgacgaaatacttgtatatcaaggactaatataaaaattgacagaaggagacgtaaattgaagcataaagatactcgtccaattactgatccaataattttaaagaagtttttgaaacatttacgtgaagatactagtatgggagaaagaaactatgctatatttcaaaccggtaaagcaaccttactacgggtaagtgatgttctagctttgaaaaagaatgatgtctttcaagccaatggcagagttaagaaaaatgcttatatcgttgacaaaaagacaaaaaagcctaaccgattatatttaactccagttagggatgttttagaggattactatgattggctgcaagaatatgaaaagaagcatccctacacgaagctgttttcttctgaatggctatttccaagttctaggagattaggtgaggatgttccaataagagaaaatagtttttatagaatttgtcatcagaccgggcttaaaattggggttaattggattggctcacactcaatgagaaaaacaggagcttttatggtttatcagcagactaatcataatactgctttagttatgaaaatgctaaatcactccagtgaagcaatgactttaagatagagaccgtaaaatattttgtgtaaggatgaatatttccttaattttattttcctgaatattagaaaaaggaatccttttcccgtatgattgatttgaacgaaaaacatactagaaaagagattccttcatgaatgattttaccaaagatatggctaatgctctattcaatcaggataaaattaatgatttatttagacaaaagctccaacaggctgtcaatgacctgcttgaatccgaattgactgcctttttaggctacaatccttatgagcgcgatggctggaataccggaaattctagaaatggtgcttattaccgcaaggttgatacgcaattcggacaaatagaaatcaaagttcctagagacagaaacggtgagtttcatcaacacactatgccagattataaaaggcatactgatgttttagagcaaactgttatcaagctctattccaagggcgtcacaacccgagaaatcgctgatttgattgagaaaatgtatggcggctattattctccagctatggtttccaatatttctaaagaaatgattcccaaagttgaggcatatcatcagcgacatctgtcagataagttcttctgcgtttatctcgatgccacctatattcctcttaagcgggtcactcatgagcgcgaagcagtttatatcgccatcggtatcaaacctaatggtcataaagaagtgattgactactgtattgcgcctactgaaaatattgagatttggagcgaaatgctcaaaggcttcaagagtcgcgaccttgaacaggtagagctcttcttgtctgacggagtagttggcatgaaagaggctatctgccagtcctatcctaaagcgcattttcaacgctgcttggtacacgtcatgcgtaatatcagtgccaaaatgcgggttgacgatcgaaaaaaagcactggatgaattcaagcagattcatactcagtcaaacaaagaaatggctgtacaggtgctgcatgaattctatcaaaactgggaaaaagcctacaaaaacgtagttagagatcttagacaggttgagcctgatctgttaaccttttacaactatccgccagctattagagcttcaatttactcaactaacatgattgaatcctttaacaacaggcttaagcggaaaaccaagcctaaaacagaatttccaactgagcagtcgcttgacacctttattggagttcaggcaatggattacaatgaccgttactttaacaggattcataaaggatttgggcaagttcgagacaccctagaatcctattttgattaaaagataaataaaaaagtcaatcaacgagagagattatttacacaaacttcttgacagtctctaatgtcttaactgttaacttaggaaaatgtcctaattgtagtaagtatgacataatttcctttattggaggttatagttagagtgaataggattgatttaactatgaaatatgatgaacagtacaaagtcattaaggatcttgtagatcacaacggcaataagaaaagagcagccttgaagctaggaatatccgttagacaaataaacaggagaatcaagcagtatcaagctaaaggaaaagcggccttcgttcatgggaacaaagaccgcaaacctgttaattgtctcaccacagaaattaacaatcaaattgtaaccttataccgtactaaatatcaagactgcaatataaaacattttgtacagctgttagatcgctttgaggacattcatgtctcttataccaaagcttacagcctgctcaagcagcaggatattctttcccctaagccttggagaaagactaagcgtgccttagccaaaaagaaatggcataagcagcaccctaagcaaagcaaacaagaagtcagcgctgcagttgatcatcaactagctttggcagatgctcatcctcgccatgaaagatgcaagtacttcggcgaagaaattcagatggatgcttctgtcttagtctggtttggtaagcgtaaggcttacctgcaccttgcaatcgacaacgctactggcattattgttggggcttattttgactgggaagagactttgaatggctactatcacgtctttgagcaaattcttaaggaatatggcattcccctttgctttaagactgataatcggactgtattcaattatgagactgctcaaaccaaagctgcccataaagatgtgctgacacaatttggctatgcctgcaaaactcttggcgtagatctaaaaactactagtgtttctcaagccaaaggcatggttgaaagagctaaccaaaccgtccaaggtcgccttaagccagaactaagattggctggaatcatgacaatcaacgaggcaaataaatacctgcatgatgtgtttgttcctgactttaaccaaaacttcagtcagactagtcgtaaagcctggtatgtttttgaaaaggctcctgatgaccgcaaaatcaattataccttggccgttctcactggcagagtgtttgatagcggctcagctatttctttcaaaaacaagctttatcaagcaacagatgaatatggcaaattagtctgcttcatgaaaggaactaaatgtctggtaattgaagccctagatggacaactgctaacgacagtagatgagcatgtatatctgcttaaagaaattcctaagaatgccaaaatatcgccagaagtagaccaagagcctaaaaagaaaaggaccaagaaaaagtggattccaccaatgtcacatccatggaagcgagaatcattcataaagcaacaaaagagagctcataaataccatcaatacgtataaaaatagcggagagcaaattctccgctaataattaaataattttgggacattttcctaaattattgacatatttttatgataattcatttgcaagcgtaagtcctcgtaaattggttttccacctaaaatgtccagaatgtagtaagcaacgaaagtaacaataatcattggcaatacttgctggacagtcccaatcatttcagtcagtagcataattgctgtgaatggtgctttttctattgcaccaaaatatgcggccatggaaatcactaggatatgagggaagtacattggcaaaataatctgcaattttatcataatattggcgcaaattattcccaataatgccccaagaactaggataggcatgaaaataccaccaggtacggaagaatcatatgaaagcattgaaaagacaaaccgaattatcaagaataagatcggtagtaaaaaaagtcccatgatccaaaggctttgacattccaattcaaattgaataaattatcaattaacacatgtgaaccaccgagtaagtgggcattaaatagaccaactggaataattaaaattaaaggaatgatactgtgataggctgcagggatttttttaattttactgaaccatggctttagcgaaagtagtacatattgataaatgtatgccattattcccaaaaagataccaattaaaggtaaataatcgttaacgggtaaataaaggaatggtttgtttccaaaggctagaatagtaacgaagtcagctgaaaaagtggcggccaagacggctactactttttgaggtttaaaatcaaaagtaatttcttcgaccaagaaaagtgcaccagctattggcgcgctaaaggcggcagccaatcctgcagccacaccgcattattgtagcgttctcaaattttccttgttagatttaaatactttttctgctaatccttgaccaaccattgcgcccatttcaatacaaggaccttcacgacctagcattaatccaggacagatagctaataagcctccaataaatttccgccaaagaatggaccaccatggcatcttattttcatttaaaagaacagcctcgatttgtggtacccctgagccaattacttgttcaaggtaaggcgcagttattttacctaatgttattgcaataatgaacatcaataagatgtagggtacgatcagtactcgctgggctgccatttgcggataaatttgataaagcaacttcatagtttgatcaataatccagcgaaatgcgctaactataactccagtagttagcccaactgaaattgcttgaaccaaagttttagtcatgttggttgaaaaaaggttttgctaaaatctgttttgcatttttaatcattacatttccccatattacagacgatacatcctttttatcctaacaaaatatagcaaaaaaggcatttatgtttttgatgaatgatcttatttttgtaaaaattgttgttcccaatcatagacattttttatatgcttctttaaagcgttagaggctaacaaaatatcttttttctcaactgcagaaataatatccattatttcctgaaccgaggatttcatacaacgatcattgtctacgatggcataacgcatacgattggtttgagtacgtaaaagatcgatggttcgctgaagcgtgggatttccggtattttcagttaaaaatacatggaatagttcatcaagtttaagataagcttgccaatcatgttttgctaaaatttcttggaattttattccataatcattagccagttgtggatctaaattgggaaaatttttttccaaggcataactctctaatagagaacgtaaatcataattgtcttttaattcagctaatgtaatatggctaacgattttttttgtccttgacgaactagtaagccttcattttccaattgtttgattgcttctctaattgcttctctaattggagtacgagacatgttaagtttaatacgcgtttgattttctgataaaagatgacctggcttaaaatgaccagtgtttatttgatctttgataaaaagatatgctttttcttgattattcatttggttctcctaactaagataattttacaacttttttattttttatattatttgcaactagtaagtgtcaatgtttttgcggtagcctttaaaccattagtctaaccttaatttcttaaatatttatatgacttaaatttctgcttagcttgcttaaataactattgccagctacctgtgcggttaatgcgccatgctggatgcctaaatgaacttcatgacgcttctttaagctgtcacgggccgctgcttttaattcctgttcagtcaatacagttatttctgaatcttcaaactcgctgctaagccaaaattccagctctcgattcttgatgcagcttaagatcctaagcatgccttctgctccagattttgaccatttcttgccttgccccttaacacggtaggtatacttgcggtggttgctctcgcagcagccaatggctttagtcacagtcagttttcgtttcttaaacggcttaatatcgtcccaatgacgatcaatataattccttaggcgccccagataatcatgattgagctcggtattcaattcatcaattagtcggctttctgcagtggttaggatagttttaactttgtcatagctgtatttgtattccaaagcagaaatcagcttgccttgcaggtcaggcgcaaaatatagcctttctttgattttcttatttaggtgaaagacatccaagaaatgctcatgacgcttgcatagccctacaatgtcatcgaagtctgttttggcatatccagcaccgccatcggcgttgctaagaattacagtatcagaaagatcataagtattggccaggtactccttggcttcgttcagcgcatcaagtcggcttaaagaaacaaattccttggcattgattcgctttctgcgtttcttgcttatattgacaatgccttcacagacctgatagcgatgaaattccaaccggcttttagtgcctttgatcaccacgccatcgccttcaagatacaaaactgggacctttttcttagtgcctgcggcatcatatcttgaatctgcttcttggcccgctttaatatttttcccggccatttttaccaaattgcccacctgcatatggctaatattaaagccagacaggcaattgactgctagagcagtattgcgataagtggcaacgctgcttacttctaagatgtttttgactgctaaaatactgtagcgcttgtatttgtcaaagcccattaattcatccaagggataccttgcttgtttgcctgggcagacatatcttcttctgacatacctaacttcgccaaaagccatattgattgagcgctcattcttcttatcaatctgatagccctgtgctttaaccttggtaatcatttcatcatcaactttagctaaagccaaggccatgatttccttaatcaggtttaagaagaaacagattatttttctttcacgcttaatataattatcttcagactttataatatttgcgatttcagttacaattgaattcataaaagaccagcttctaatgtgttttttgttcttaacatcagactactggtctttttgtttgagctcaagtccaaattcaaaggacttgggcttttttaattatttattcaacttaccgtaaaaaattatacacttagttgcaactaataaaactaaaaacttgtatacaggttatctgtggtaaatcgttgacttacaaaatataagttttactatgtaattgtaagttaaattttgatagaaatgaggaaagaaaaatgactaaaattgcagtacttggtgcaagtggacaaattgctaaattagcagaaaatttatttttggaagataaaaataatgaattaattttatttttacgccatcctaataaattggataaaaaagatatcgatgatcaacgtgaaaggattgtcgtaggggatgcaagtaaattggatgaacttgctccggctattaaaggcgcagatatcgtttatgctaatttagctggttcaaatattgaagatcaagctaagacagttgttaaagctatggatgaagatggtattaagcgtttgatttggatttcctcgttaggagtctatgatgaggtaccaggcaaatttggtgaatggaacaagaatattttaggttcatatttgaccacttatcgtgcagctgctgatcaaattactgctagcgatttggattacacgattattcgtccagcttggttgaccaataaagatgaagttgactatgaaataactgaaggcgcaactaccccatttaaaggaactgaggtctctcgtctaagtgtggctagttatgtaaatgaaatagttaaagaccaaagtaaagacagtcgtggtaatgttggtttaaataaaccaaataccgacggtgataagccagcttggtattaaaacaaaaaaataaagaccagcttcaaactgcaatgtcattaagttaagacattgacaaattgaatctaatctctgtagaaccgaatcattatgatttggttctttttttgcataaaataaaggagaaaagaacctaccttttcgccctctgattaaattattaaaccttcaaaattattgccagaaagctggtgttaattatgaaagcccttcacagaaatattttagatcgtcttgatcaaattatcaatgatactggaaagcatattcatgattttatcgatgatcctcatgccttcactaggaagcggtttttagatgcagctacagtcattaaaactactattaatatgcaaggaaaagatttgaccagtgagttgtttagagcttttggccaaaaagctattaaaaataacgataaagtggtcagtacttccgcttatgtccaacgcaaaggtcagctttcacccgcatgttttaagcatattctaactgtatttaatcagaatttatttaatatccagttatttgatcataaatatcgtatatttgccattgatgggtctgattttaatcaaatctggaatcctaaatcagagaatatcgttggaaatctcaatcataaaggaaagccatattgccaaattcatgttaatgcactctatgacctgttaaataatacttatcaagactgcatctttcagcctaagtcaaagatggatgaacgtaaagccgccgttcaaatgcttaaaaagctaaattgcggaccatatatagttactatggatcgaggttataccggctttaacatgattgaaaattgtaatcgcctgcctaactgttattatgtcatacgtactaaaacgggatatggcgcatttaaggaagtagctgagttgcctaatcaagagtgtgataaggatatagcttgctgggtgactacctctaattattattatgaaacccataaggctacagaaaacgttcatttggttaaccatcattaccgtcaatatataaaatatcggtctaaaaataccaaagatggcagctgggactttggagagttatgtacaataaaatttcgtgcctgtaaatttagaattaatgatcctaaatcaggcaaagaagaatgggaagttgttctaactaatctaaatagagccgattatcccttaaaaaggatcaaagaaatctaccatttgcgctggggcattgaaacttcattcaaaaagttgaaatatgctttaggtagcgtacagtttcattccaagcaggatagatttattgaaatggagatctatgcccacatgattatgtttaacgcagtcagtcaaattgatgctcaagcatatgtaccacaaaaaaaatgcaagtatcaatatgcgatcaatttcaaacagtcatgttttgtcatccaggctatgtatataatttcttcttcaactgaaatctttaaaaagattcttattcaaattagtcattacacaattccgatcagaccaggacgaaaagacaaaagaaatctcaaacccaaatcagctgtatattatttatatcgtgtagcctaatttctaaacaagatttaggtttatttggcatgaaaaagagcattcaaatgcgataaatcgcaaatgaatgatcttaaaagtccaagtcgataatttgtcaatgtcttaacttaatgacattgcttcaaactgaaactggtctttattttggcttaattatttttcgaattgtttgccccaagcccatggatcttcgtgccaggtctttaagacatcatattgcgtgctagaaatatgacctgactcattttcctttttgagtaattcagggtaggaaagaagcggagcatatttaacattagctttagcaaagttttcttttgcatccggtaggtagtaggtgaaaattgaagaaacgccaatgacgttgccaccatctttttcagttgctttaactgcatttaaaacggaaccaccagtggtgattaagtcatcaattaaaacgatcttatcatctttactgaaacggccttcgatttggcggcctttgccatgatcctttggcttaggacgaacatagatcattggtaagtgcagtttatctgcaacccatgcggcatggggaataccggcggtagcgacgccaccaataatagtagcctcagggaattctttggcgattaaattagctaaatcaccagcaatcatatcgcgtaattctggatatgaaaccgttaacctaaggtcggtgtaaattggagaaagcatcccacttgcgtaagtgaatggtttgtcaggtgagatagtgataattttttcttgaataagttgactgataatttgatccttatgcattttagttaaactcctttttaattgcttcatatgcagcttctgggtcactggctaaagtaattggccgtccaacaacaatagcgcttgagccccattctttggcttgcgctggtgtggccacgcgagattgatcgtctttagcattgccagcaggccgaattcccggtgtgacatataaaaagtcatcgccaactttttcgtgtaattcttttacttcaagtggtgaacaaataaccccatctgctccagagtgcttagctatttttgctagcgaaagaacttgctctttcattgacagtgcgcaattttgttcatgtgccaatacttcatcagaaatcgaagttaattcggttactgctagtaacttaggcacgcttttgccaacaggtgtacccgcgattaaaccgtctttagctgatttgatcatttgactgccgcctaaagcatgaacggtagtaaaagtaattcctaacttagctaattgtttagccccgttataaacggtattagggatatcatgcaattttagatccaagaaaatcttataaccttgctcagctaagtctttaaccacttggttgccagcgtgatagaataattccataccgactttgataaagacgttttctggtttgcctaatttagacaaaatcttatgcagttgctcttcattgtcaatatctaatgcaacaattacaggtttcatttttcctccacaaaaaaagtctatcttagcgcagagagacaccaaggatagacttttcctagataatttaagtcaatattttgaacttgcggtctctctgtaccgtttaaagtttgatcaaggtgaagtttaacacctcaaaagtaaaaatacaaataaaatttttgcttggaaaaaattataatcacgtgtagaatcatttcttgaaaaaataaagagtgtccgtgagcattcattttggaggaaaattatggttaatacacatgtaaaattaccaggtttagatttgaaaaatccagttatgccagcaagtggaacttttggcttcggcgatgtgcctgcagctaagaagtttgacttaaatgatcttggagcaatggttattaagacaactacgccacatgcaaccacaggtaatccgcaaccacagattgccgttttagatgatggggttttgaattcggttggtcttactaatcctggtgtgaacaaggtgattagtgaaaagttagaaccattgagaaagcaatatccagaattaccgatcgtggctagcgttggcggtgatagtgaagcagattatgttgaagtagcacaaaagctgtcaaattccggcttggttaatgctttagaaattaatgtttcttgtcctaatgtggcccaaggtggaatgagctttggcgtgcatgccgatgtggttgaagaattgactagaaaaattaaagcagttgtcaatattccaatttatgtgaagttaacaccaaatgtgactgatatcactgtaattgctaaagctgccgaaaagggtggtgccgatggcttatcgatgatcaatacattgctagggatgcgaattgacgtgaaaaaacgcagaccactgttaggccataatatgggcggtttatcaggtgaggctgttaagccaatagctattagaatgattagtcaagtgcgtcaaattacttctttgccaattattggcatgggtggcattgcttcggccgaagatgtggtggaatttatgttagcaggtgctaatgccgtagcggttggtactgctcattttaaagatagtattgcttctaagcatattgcagatgccttgccgcaagaacttgaaaaattaggcattgaagatatcaatgaattagttggtcaagtaaaatttaattagagcttgacaaacgtttctaattacagtaactttaaagcaatgaatgtcctttaaaattagtcccgtgaggctagcgaggcaggcttaacttaagtttcgactttactaaagctcctagtctcagttgagattgggagcttttttcatgggcagaattaggaggctataatggcaaaagaaatctgggatgcactagcaatgaagcgtgctttaacccgtattacttacgagatcattgaacaaaataaaggaaccgatgatttggttttggtagggattaaaacgcgaggcgtttacttggctaaacgaattcatgaccgtattcagaaattggaaggcgttgatgtaccagttggtgaattggacattaccttatatcgggatgatcgtcatgatgctagtttaaagcaagatccagttgtcaattctgatcaagttggtgttaatattgatgacaagcatgttgttttgattgatgatgttatctatactggacgaacaatcagagcggcgatggatgctttgatgcacgttggtcgcccaagttcaatcagagtcgcagtgctagttgatcgtggtcaccgtgaattgccaattcgtgctgattttgttggtaaaaatattccaacttctgccgatgaacaggttgctgttaatgtaattgagaaggacggcaaagattcagttgaactgaaggctttaccaaaataaaaagaagatagttaaatatccaaccatttaattgactccagagagggccagaagggttgatttcttttcgtgtacacgggaagactctaggcctggagcaattaaatgcttcaggcttttttgtatagaaagaatagaaaatggaaaatttaaatcttgttaatttaccacattttgtgagtgttgaaaatttggatagtaatgaagtagaagccttaatcaggagagctgagtacttcaaaaaaggcggtgcaacaccacgtttaactaagccagtttatgtaactaatatgttttttgaagattcatctagaacacatacgagctttgaaatggctgaaagaaaactaggtttgacagttattccttttgatccggctcattcgtctgttaataagggtgaaaccttatatgacacttcattaattatgaacgccttaggtgtcaacttagaagtgattcgtcactcacagaatgagtattacaatgatttgattaacttaaaagaacatcaacatttaaatattggtgtgattaacgctggagatggtagcggtcaacatcctagccaatgtatgctcgatatgatgactattcatgaacattttggccactttaaaggcttaaaggttgcaattgttggtgatattactaattctagggttgcaaaaagtgacatggaacttttgactaggttgggcgctgaagtttacttctcaggtccaagttactggtatgataaagaattcgatcaatatggtaagtatgaagaaattgatcaattagtttcaaatatggacgtgatgatgctcttacgggttcaacatgaacgtcatgcaggcgatcctaatgaaaagacttttaatgctaaagcatatcacgaaaaatatggtattaatcagcaacgctatagtgcattgaagcccgacaccatcatcatgcatccgggtccaattaaccatgatgttgaacttagcggtgatttagttgaaagcgataagtgcatgtttgtcagacaaatgcaaaatggtgtgttcatgcgtatggcaatgatcgaggcagtattgcgcggtagacgacttggaggattagaataatggcaacagtaattaagaatggcacagtttatcaaaatggtcgtctaattaaagcagatgttttaattgaagatcaaaagattaaagcaatagggactaacttaacggcagataaagagattgatgcaagtggcaagctagttagtcctggactggttgatgtccacgttcattatcgtgatcccggacaaacttacaaggaagatattaaaaccggtagtgaagccgctgctcatggtggttttactatggtaggggcaatgcctaatgtaacgcctgtacctaatacgcctgagctaatgcaaaaaatggtacaagaaaacaatgaaaaaggtgtggttcatatttttcaatatggaccaatcactaatgatgaaactactgatgtcattcctgattatgcagcattgaaaaaggctggtgcttttgccttaagtaatgatggtcatggagtccaaactgctcaaacgatgtatttggcaatgcaaaaagccaaggaaaataatttgatcattgctactcatgcacaagacgattcgctttttaataaagggatcgtgaatgaaggacctaaagccaaggaattaaacttgccgccagtaactgaattagcagaaacaacgcaaattgctagagacttgcttttagcacaaaaaacgggcgtccattatcatatttgccatgtatcaactaaaactagtgtggaactggttcgaatggctaaggcgcgtggaatcaatgttacctgtgaagtagcgccacaccatattttattaacagatgacgatattcctaaggacaacggttattataagatgaatccgccattgagaaataaggaagatcaagcggcgttactagtgggactactagacggtacaatcgatttaattgcgactgaccatgctcctcatgctcgcaatgaaaaagaaggtggcatgaagggcgcagcatttggtattactggtagtgaaacagcattttctactttatatactaaatttgtcaaagaagaaaaagtcttcaccttggagcagcttttatcatggctctccgataaaccagctaaaacgtttggcttaaaaaatgccggggtacttgaaccaggtaagccagctgatattgcgatttttgacttagaccatgaaactgaattaaaagaagaagactataagtcaaaaggcgttaatacaccatttacgggcgacaaggtgtatggtgaaactgtaatgaccatggttgatggtcaggttgtatacagaagggatgaacaataatgcggtatttaatcctagaagatggtagcatctatgctggcgagggttttggcgctgattgcgaaacagttggtgaagttgtatttacaacagggatgactggttatcaagaagcaattaccgaccaatcttatgccgatcagattttggttttcactaatcctttaattggaaactatggtattaccttggcagattatgagtcacttgagccaaggatcaaaggcgtaatttgtcaccaggttgcccgtcatcctgataattggcgaatgcagacaaccttaccaaagtttttggagcatttgaacattccaggtattcagggaattgacacgcgtgaattagttaaaaaattgagagttcacggtacattacgtggtaagattgcagattcaaaagaaaatgcagaaaaaattgcggcagaattaaagattaagaatgtaactcaaggtgtaattagccgagtatcaaccaagtcaccatatccagttcctagttcgaaacgcaatattgtggttatcgactttggaattaaacacagtattttgcgtgaactagcagaacgtgattgtaattgtattgttttaccatatacagctactgcccaagaagtattaaaccttcatccagatggtgttcttttgagtaacggccctggtgatccagaagaaatggtagaggcaactaaaatggtgcgtgaagtagaaaagcatgttcctttgatgggaatttgtatgggacaccaagtctttgctttagctaatggggctaaaacttacaagatgaaatttgggcaccgcggttttaatcaccctgtacgagagattgcaactggtaatattggttttacttcacaaaaccatggttatgctgtgtctgcagattcaattgacaaggataacttaatgattacccacgttgaagtcaatgatgggacggttgaagggttacgtcataagaaatatcctgcattttcagtgcaatttcaccctgatgcaacaccgggtcctcatgatgaggtttcgttattcgacgactttatgtcaatgattgatcagagaaaggaagaagagcgtcatgcctaaaagaacagatattcataagattatggtgattggctcaggtccaattattattggtcaagctgcagaatttgattattctggtacacaggcatgcttggctctgcgcgaagaaggctatgaagtagttttagttaattccaacccagctacgatcatgactgatacaacaattgcagataaggtgtacattgaacctctgacagttgaatcgatttcacgaattattcgtcaagaatatcctgatgctattttgccaacacttggcggtcaagtgggcttaaacatggctatggaacttgccaaaacaggaattttggatgaattacacatcgagcttctaggtactaagctgcaatctattgaacaagccgaagaccgtgaaaaatttaaggaattatgtaagtcattaggtgaaccagttccaccttctaagacagttaatacagtcgaagatgccttagcttttggagatgagattggctatccgatcattgttcgtcctgcctttacgatgggtggtaccggtggtggtatctgtaataatcatgaagaattagcagagattgccaaaaatggattggaactttcccctgtaactgaatgtttgattgaaaaatcaattgcgggctataaagaagtagaatttgaagtaatgcgcgaccatgatgacaatgcaatgattgtctgctgcatggaaaactttgatccggtagggattcacactggtgattcaattgtcttttcaccaagtcaaactttatctgataaggaatatcagatgcttcgtgattgttcactgcgtttgattagggctttgaaaattgaagggggatgcaacgttcaacttgctcttgacccaaatagctttaattatgatgtaattgaagtaaatccgcgtgtttcaagatcatctgctttagcttctaaggcaactggttatccaattgctaagatggctgctaaaattgcagtaggaatgactttggatgaaattaagaacccagtaacgggaacaacctatgcagaatttgaacctgcattagactatgtagtctgcaagataccacgctggccatttgataagttccctaaggctgatcgcgttttgggcacccaaatgaaagcaaccggtgaagttatggcaattggccgtactgcagaagaagctatgcaaaaagcggtaagatcactagaaattgatgaaaaagatctttactcaccagaagcacacgtagctagtgatgaccaattagagcaaaaattagtcaaagctcaagatgatcgtctcttctatttagctgaggcatttagacgtggttattcagctgaagatgttcatgaattaacgaagattaatttctactttttagatatcgtgcaacatatggttgaattggaaaagacacttgaggaaaataaagatgatgttgatgtattgcgcttagctaagaaatatggctttagtgatccaacgattgcctctttgtggaatgaaactgcagatgaggtaagagcatttcggaaaaagcatggcatcatcccagtctacaagatggttgatacatgtgctgctgagtttgaatcaaagacaccatacttttattcaacttatgatgctgaaaatgaatcacataagactggtaagaagtcggtgatcgttattggctcaggtccaatcagaatcggtcaaggtgttgaattcgattatgcgactgttcactgtgtcaaggccttgcaaaagatgggctacgaagcaattgttatcaattctaatcctgaaactgtttcaactgacttctctatctcagataaattatactttgaaccattaactttggaagatgtcttgaatgtctgcgacttggaaaagccagaaggcgtgattgttcaatttggtggtcaaacctcaatcaatttggctcatggcttagaagaacatggcgtcaagattttaggcactaaagtagctgatgttaaccgtgcagaagaccgtgaactgtttgatcaaatcattaagcaacttcatttgaatcagcctcaaggtttaactgcaactactcatgaaggcgtacttgaagctgctgataagctaggctatccagttttagtccgtccaagttatgttttgggtggtaaggcgatggaaattgtctacaccaagggagagttagaagaatacttgcaagaccacgttgatattgcagcagaccacccaatcttggttgatgattatcttgatggtcgtgaatgtgatgttgatgcaattagtgatggtaaggaagttcttttgccaggaatcatggaacatattgagcatgccggtgtccactctggtgactcaatggctgtttatccaccacaaaccttctctgatgaagttaaagaaaagattactgatgtcactagaaagcttgctttgactttgaactgtgtcggcattatgaacattcaattcattgtcagagatggtgaagtttacgtaattgaagttaaccctcgggcaagtagaacagtgccatttttaagcaagatcacgggtattgaaatggctcaggtcgctacccgagtaattatgggcgaaagtttggctgaacagggctacggtgatggtcttgccccagagccagacatgatctctgttaaagcaccagtcttctccttcagcaaattatcggacgttgatgcatatctcgggccagaaatgaaatcgacaggtgaagtaatggggagtgatcacacttttaccaaagctctctacaaagcttttgcaggtgctaagatgcaattgcctgaaaatggtaatgtattacttaccatcgaagatcgagacaaagaaaagattttaccaattgccaagagatttgcgcggattggctacagaatctttgctactaagggtacagctgatttcttgcgcagtcatgatttgcatgttgatccagtaactaaagtgcatgaagatgaagacgccaaggataatatcttgaatgaattaagaaatggcaagattgacttggttatcaatacgatgggtcacgatattgaaaagaattctgatggcttcatcattagacaggttgccattggtcagaatgtaccattgattacagcacttgatactgcagatgctttgcttactagcttggagaatagatcatttgctactgatgctttgaagtaggatagttgaatagataaaaataatgcatttctctattgaagtaggagaatgcattattttttatgcaaaaaataattttcacaagtgaactaataattctgagataaataaacgatagatagcattcaatcaagatattgtgaaaaaaatatgtatcacaaactttattatagagccatgagtaagaatatttcactatcttttgtaagcgaatacatttataatctgagataaggaagtgaagtgtttagggggaaataaaaatgtggatttcgtttttattggctttaattccaattatttggcttatttactctttggcaattcgaaaaacgcctgctattaaagcatgcagcattggactattaattactatcgtattggctatactgggatttaacctctctatagttgacactttgacgggtgctttagagggcattctgatggggctatggccaattgtttatgtaatcgtggctgcactgtttacttataatgtaagcaattattcaggtggaattaaaattattcaagatactttgtcgtcaatcactactgatcagcgtattttagttttgattatcgcatggggatttggcggattcttagaagcaattgcaggttttgggacagcagttgcaattcccgctgggatattaattggatttggtcttaatccgattaatgccgccataatttgtttaattgctaatactacaccaactgcctttggtgcaattggattaccagtgattacactgagtgacgtaactaatttgcccgttactccattatcatttgttattactttacaacttgcattattaattattataattccgtttttattggtgattctaacaggtggcggagttaaagctatcaaaggagtgggattaattaccctgatgtctggtttgtcattttcaattccgcaaattttggtagcaaaatttgttggtccagagttaccagcaattgttggttcaatttgttgtattttgactacagttctgatggcaaaattatatcatcatcaagataatgacataaaagagaatattgagaagcacagcgctatcgaaattttgcgtgcaagttcaccatttattttagtgttcgtatttgtggttcttgcttcatcactgtttccagatattcagcatctattgggaaaagtgacttcttatattaaggtatatactgggaaagatacagaactgtttaagattaattggctttcttcaccaggaacattaattttgctagctacttttattggtggattaattcaaaaagttagtttcaagaaattaggacaaatcttaaaatcaacaatttttggattatggaaaacattaattacaatttgttctattgtggctttagccaaggtaatgggctacgcaggaatgacttcagcaattgcggcagcattagtagttctaatgggaccaatatatccattagttgcaccgttaattggtgctttgggtacgtttattacaggatctgatacctcagctaatgttctttttggtaacctgcaattgtcttcagctaaggctttaggcgtaaatagtaattgggtagttggttcaaatatggtgggagcaactgctggaaagatgatctcacctcagagtatagctgttgcttcagctgcaattggacaagatggatctgaatcaataattttgaagcaagtggctaaatggtgcttattgtatttgggaataatttgtatattcctatatggaataggctttgccgtaggatttttataaaaataatttaaataactcttggtgttctgatatatattgatttgcacttgtcatccattaatagtaaatcgcttgcattaaaagcgctttcgtgaaactgtcaaatcttttgtgtaaatagatctttctcgtaaattgattttttaattatttatttaatcaaagtaggattctaaggtgtcctgaacctgaccaaagcctttatgaattcgattgaaataacggtcattgtagctcattgcctgaatgccaataaaagcatcaagcgactgttcagttggaaactctgccttaggcttagctttgcgcttgatcacattgttaaatgattcaatcatgttagtcgaataaattgaagctctgatctgcttgggatagttataaaagaccagcagatctggttctatgtctttcaagcttctgataacatggctgtaaaccttgccccatttggtatagaagtcatgcaggacagctgtggcttcttctttgtttgtctgttgatgcacctgtttgaattcgttcatgatcttttcacgatcgtcgacgcgtactttagcgcagatattgcgcatgacatgaaccaaacagcgttgaaaatgagctttaggataagtcctggccaaggctgttttcatgccaacaacaccatcagaaagaaaaagctcaacttgctttaagcctcgggatttcatgttttgaagcatatctgtccagacttcaatgttctcgctaggcgcaatgcagtagtcaatgacctccttgtgcccattaggcttgatgccaatggcaatatagactgcttcacgctcaaatgtttctcggcgcaaaggaaggtatgccgcatccaaatagacgcagaaaaacttgtcgcttagcttgcgtttgtggtaagcctcaacctttggaatcatctgcttggaaatatttgatacctgagctgggctgtaatggctgccatacatcttttcaattagatcggctatttccctggtggtcacgcccttggagtaaagcttgataatcatgctttccaagatatccgagtgctgcttgtagccaggcagcgtgtgctgatgaaattgaccgttgcgatcccggggcacttgcacttcaattgggccaaattgcgtatcaactttgcggaaataagcaccatttctagagttgccagtattccagccatttctggcatagggatcatagcccagaaaggcggtcaattcagcttctaacaagttattaacagcctgttgtagctctttgcgcaataaatcatttattttgtctggattgaatagagcttgagcaaaatctttggtaaaatcattcatgaaggagttcttctttctgtatgtgtttttttgttcaaaccaatcatacgagaaaggaacccctttttctaatgtttaaagaaataaatttaaggaatcattcatccttacacaaactattttacagtctcgctttcgttgatagaatgctttttgtaacttttttacattaataagggagacaaaacgaatgagttatttatttctgttcattccggcaataggatggggtcttatgcccatgtttgttgctggtgtcaagaagagtaacatttaccaccaaattttaggtaccgttcttggtgcatttatctttggtgctgcagttactctcattaagcgtccatcttttaatgcgactacttttattttagcaatgttagctggtgctgcttgggttattggtcaagttggtcagtattacagttattccaaggttggggtttctgaaactatgccaatttcaactggtttgcagttgatcggtgtgccacttgtaggtgtgttgatctttggtgaatgggcaagcactcaagctaaattgtttggatttttagggatcttagctttaattattggtgtagcatttacatcattgactgacaaaggtacatctgaaggtggaaaaaagaatcagaccactacaatgattgtgctggtattgactacacttggttacattacttcaagttccattccaaaggccttgaagggtgacagcataatgattttctttgctgaaaccattggaatgttggttgcagcaattgtttatttaattgcaactaagcaaacacaagtctttaaggaaaaagaaagttatcaagtaattcctgccggtgtgatttacgcaattgctgctcttgcatacattgtttcagttaagatgaacggtgtaaacctagcctttgttatgtcacaactttgtgttgttatttctactcttggtggtatccttttcttacacgaaaagaagacacaaaagggtcttgtctatactgtgatcggtttaatattaattgttgccggtgcagttttgacctcagtattttaatgaattttaaataaatattgaatgaactccaacatgataattgttggagtttttgagtaaaaaaattcatgaataaatataaaatgaattaaaatataagtagaagccaaagagaggatgatttctatgagtgataatacagtatacgtgatcgacggtcgtcggtatgcacgtaatggagaaattgtcgaacataatgtgcatgtttatagttcttatcaaaatctgattgctgcatttaagccatttttggaagtttcaaataaagaagtgcatatgaatggcaaaaatgagatgcttcaggttagaatatatgatccatcaaatcaatttttgacaaaatataaatttgatatttatgaaaagaaaatagataatttctttccaagtactactgaacatatttagcaaaggaatgatccgatgacttttaacaaagaagaaaaagagcaagctttaaagcggctaactgatgaggaatataacgtaactcaaaaggccgctacagaatatccttttaccggaaaatatgatgatttttatgaaaaggggatttacgttgatgtagtgtcaggtgagccacttttttcaagcttagataagtataatgcaggctgtggttggcctagttttactaagccaattaagaaattaacttaccaccgcgatcaatcgcacggaatggagagaacagaagttaaaagtcccgaagctgattctcacttaggtcatgtttttactgacggcccagtggatcaaggtggtttacgttactgcattaattccgcagcattgagatttattccatatgatcagttggaacaggctggctatggtgaatataagaaaatatttgaataaaaaatacggcagatacttaaaataaatatctgccgtattagtttatatattaaaaattatttctcatagaacttaatttcagtattggccaaatcaactgtataagtttcttcttcaagtggtcgtttagtcattccttcatcagttgagtagatgatcaaggccaacttactaccagatggaagagtgtagtaggtaggttgaagcaagaagtctaaatcgtagaacttgtcagcatcaatcttctcaggtcttttcatgtccttatagttttgtaagttcatgtgagccttagtgatcaacttagccttagtcttcttgtccggcacaaattcttgcaaagtatcagtgccaaatctatagccaagttcttgaccgccgcgcattaagaacttaggtgtagcggttaagcgtcttctttctcccaattcaactaaagcaacagaaatttgtcccttaggtaagctgcctttaactctaacttttacttcaggacgaccgacaatcgtagttgggtgaataaattcgtctgtttcaaaacgcaaacttggtttagcccatttttcatcaccacagatgaacttgtatagccagtcgctttctgagatgtcagccttcttaaattcaatgccaccttcatcgacaaatgattgttgtgctttgccattgccatcttggaaaagctcgccgtcatcagttgggtagtaggttttcttttgacctaattcatttgaccaatccttttcttcgtgccacttgtcagcttgcaagttgtcctggatcatgacggttggccattgcttgtaagcattgttttcaatccctagtaattcatgtacaaaccaaaggttcatcaagtcagtaaaatcaatagaaacaaagttgttcatattgtagtgaggaccttggtgtaggaaaagatgatgcttcattggcatttttttgactagttgccaaattttataaacattctttggcttaacgttccagtcatttaaaccgtgaacagaaatccaagaacatttgatgccgtcagcgtgatggcggtagtttcttgcttcccaaaagttggaatattgaccggtttcacggtcttcttttgttaaaagctctttttgcatcttgtcgtattccggtttgatcttcaagtaagaacctgcatcccacaagtttgattgacaagtttcagccagtaaatcaaggtcttcaccttggcaggcttcgggtgcgattaccaaaccgtgttcacggtaatagtcataccaagaagaaatagcagcttcagaaaccacagttttcaaacctttaaccccagtagtggcaatagcaatttgcaaagtgcctaaatatgaacgaccagtcatcccgatattgccattgcaccagtcagctttggtttgaacagatctagtacggtcagtgtaagcaatacgatcgccgtggagccattcgataactgcagcagctgattcagtttcttcaggtgcaccagtaatacgaatcccatcactaccacgggtaccgattgctccagcaaaaacactggcaaaaccacgagcaagcatatactcatttaatggataagaagatttatgtactgcttcttcggtagctgggtggttagagtcgtctggctgctttgctttaactattggtgaatgaacatattgtggatcattccaatcggcggcatcagataaattttcatcaacattatggttacgcttttcattagcgataattccgccgaaatatggtgaagcagtataaagggcaggcacttttaagcctttgttagtttcagctggtcggaaaacagtaacttgaatcaagtcactcttaccatcatgatcagtatcaagatcagtttcaacgtaaacaacttcacgaattactttgttggtatcgaagacaggaatagctttgccattgaaaaatttaaacttattttgtccccagaattgagtaaagtaccccttaccagccattacatcgagcaaaatttgaccgtttttggcgcgagtattgagcaaacgataaaaagcagagattaactttttgacatcagaaatgtcttggacaaaaggtaaagcattcttttgcataaagccggttggatcggctaattcgtagtcataatgaacatgatagccaagtaattgtaaggctacattatagaattgagcagtaccaattgattcaggctttccttttaaaaagtcagctaaagtttgctcatttgaaacagcaaattcagataattttgttgtcttagcagcgtcagtttttgcttcagcaattgtcattttaacgagcttgcccagcaaatcgttaaaattccagtctgcataatttttaggtaagaaattgatgtcgattaattcttttacttgttgatcgaagtcagtttcgacataagcgtattggttatatttcatatttttctcctttgcagtttaattactttctattttacttttaattgtggctataaccaatagatatggaagttaataagcgaaaaatatttttattttggtattcttttctttaaaatggacttaaacaaatcggtgatgctaaatgagaaaaaagttttcacttgtcttgctacttacaacgatatttacaatttcgctgacagcttgtactaatcagaataaggttgatcatactaaaagtcagactaaaatcacctcaacaccgacattatttttccacggtggtggttcgtcatatcatgctgaagaacacatggtggcagcagctgagaaagctggggtcacgaactcagtgattagagctgaggtggcgcctaacggtaaggtttctttgagtggaagttggaaaaaaggtgccaaaaatccaattgtagaagtcaattatgaaaataaccgtgagttgaacttttctcgacatggtgtttacgccactaatgtagtgaaggctctgcaaaagcgttatggtattaaaaaatgagcatgttcggtcattctttaggaaatatttcgatcatttattatatgctgcaaaatggacgtaaccggaagatgccacaattagtcaagcaagtcgacatggcagaacattttgctggtttgaactttagccgtgttcccgcctcaattcgtcaacctaaaggtttaaaattgaattctgccggaaaaccgaacaaaatgaatgctagctatcggaaaatgacgggtgtaagagaaacatatccgaaaaataaggttcgtgttttaaacatcattggtgatattggtggtcaaaccgatggaacagtacccaatgtatcatctttgtcattaaagtatttagtggcagatcgtgctaaaagctatcaggtagtgaagtttactggaaaaaatgcacgtcactccaagttgcatgagaatccaaaagtagataaagtattaatcaaattcctgtggaataaataaagttagtaataggcatgcgaacgtatgtctattttttgtgccttttcttaatccaattacttgaattataacttaaacttcccacacgcagaatcgctccttttattgtgattctgcgttttttaacaaatataaaaggcacatgaccttttcattgctataattaaagtgaccaaacgataattctatgcatgaaaggcttgtgccaatgtctattttaccatctcctgaccaaaaaaatgaacaactattttcaaactcaatcatcagcttcatcaagaagtttcaggtgatcaagctgttgagaaaatgtggcttccgcaaggaaaaaggcattagcctgttcagcttgtttctttacgttttaagcaatgtctttcgtgaccgcagcttatatatgcagctgaaaacggatcattttaaagaaagcttttctaaaaattcttattaccgatttatgcgcaacgtccacgtcaattggctccacttcaccacactgctttctgcgcaaatcattaataatcacttgcgatctttgacttcagaaaaacgggctgattgctttgttgtcgatgattcctacttctctaggaccggcttcaagaaaacagaattagtcgccaaagtttttgaccatgtatcaatgacttacaagaaaggttttcgcatgatgaccctgggctggactgatggagcttctttcatgccaatcaattcggtgttgctgtcctctcacaagctacagaatatgattggcgaaaacaaagtctgtgatcagcgcaccattgctggcaaaagacgcatgcttgcccggactaaaggcacagacgtgatggttaatttaatcgaccaagctatgaaagcaggtcatcaagccaagtacgtgctgtttgacagctggttctcaaatccacatcaaatcgtccagctcaagcaaaggaagctggatgtaattgccatggttaaagttagctccaaaatcaaatatgaatttgaaggagaacgcaaaaacatcaaacagatttatcgtagctgtaaaaagcgacgcgggcgttcgcgctatctgttgtcaattccagtcaaggttggccgccaagacaaagacggtgctaaaattgacgctcggataatttgcgttagaaaccgtgccaatcgtaaagagtggctggctattatttgtaccgacatgtcgcttagcgaagatgaagtcattcgcaattatggcaaacgctgggatattgaagtttttttcaaaacctgcaaaagctacctaaaactaagcacggaatatcatggtctgtcctacgatgccttgactgctcatgtggctatagtctttacccgctatatgctcatgtcagtagccaagcgggacgacgaagatgagcgaaccttaggtgagcttttctattgcatgattgatgagctggcggatattacattcagtcattcacttcagctaatcacaaaagcaatggtggctagcgttgaaaaagtctttcatgccagtgaagcacaaatagcagaattcacggctgactttatcaatcgtttacccaaatacatgcaaaaattgttaaagaaaactagcaaaaatagtatagaagcccaaagctaagcaatatcaaagaattgccagcttatttgatgtgggaagtttaagttataaaataatgcgtgtataatattcatctaattaataaagaaagggcatggttttatgaagctattaaagactaaaatcttaacaattctgtgtggcttgctaacattgaacggcttagccatgttgttttcaggattgattatccaaatggacgaagttgctgattttgattcagcccaaagtttagcagttgctaattcgactaatgccattattttggcaggaattattatgattttgctttttggggcattgtttttcgatggttgggctaagctcaagaacaggcatgctaagcacgttaagttagtttaatagaatagataagactagctctgaagtgagctggtctttttttgcccaaaattaaagtcttctttaccgtttttttacttttgcatgtgataatgagccaaaattaatcagggggatagttatgggattctggtattattatgttttgccattagtgacggctattttattcgtttggctaggaaaccgagttatggtgactaaaaaatggattagcataattttttactcattagctggagtaggctatttaattgcatcggtttttgctgttttttatatctatgcaacagtagaagaaattttaacgccagatattttaacaaaaataggttggcattatttttggagtgataattttatttttcttcttaccagcactgttctattaacaattagctattttgtactaaaacgtggtagattacggatgaaataggatgctcaaaaatgataagattatttttggaaaaaatagaataatgatggggtgaaaaaatgactttaccatttaaggcagttgctgtagatatggacggcacgtttttagatgatcgtaagcagtttaatcacaaggaatttgatcaaattttgactgaatttgaacaacgaggagtacattttatcgtggcttcagggcgtccttatgttagattgaagcaggactttggcaagtttgccagcagaatggatttcgtaactttgaatggctcgagattaatcatcaagggtcaagaagctggcagttatttgcttaatcgcgatgacgttttaaagctaattcatgatgtacatgtgaaatatggttaaatggctacgatggtttttggccgagatattgcatatttgcatagcaatgttgaaaaagatgaacgcgactttttggcttactttgctggtaatagcactgtaattaatgactggaatgacttaccagataagatttatcagatcacatttggaatggacagttctaaggctgcagaaattgaacgagattttaattctaagcacgataaccagatttctgcttttgcttccgctacttttgccattgatgttaacacacaaggtgttaataaaggcgccggattaaagcatctcctagaaaagatggggatgacgggggatgacctgattgcctttggcgatgggggtaatgacatcgatatgttgaaatttgccaaatattcttatgcaatggcaaacggtatggacaaggtaaaaaagcaggcgaaatatattgcaccggccaatacggagaacggtgttttcaaagttttgcaaaaatatttagctgaagataaaaaatagcttgtaaaattaaattaatatgatatagttttaattaacttatagaaatagaggaaattgccatatgattcgtttactgaatctctaatatttgatttgttgtttagcaaaatactgtctttgcaccttgtttagtgcacccattttttgcttgcataccaagtattagcagtagatgaattgagggtggttttctttatcgaaatcaacctttatttgttgcactgttaataggatgtgagcatccagaacagtgctttttctttgcgacaaatcatgttagagatttttttgctgattatacgtttttgtcaaaaaagaatgaggaaaataatgggtttaagagattatattaaaactaaccgtcagcgggcaatgttagttctgtttttgattacgctaacgcaactgacaactacaatgtacacctacttaactagtccgcagttaaatgcaattgcaagtggtaaattcaaactgtttttggaattaatctttgtacaatttttaattggacaggtctgcaatgtcagttttaattggggaagtttacaaaataccaaacaaacacagacactttttcatcaggtaagacaacgaattatacgacattattatcagcagcctgaagacaaagtttcagagatggaaaatcatttgggaaatgacttgcagttagtgcaagagagttactataatgtttacttctattttgtttgtgacttaatttatattattttaactattggtacgctgtttacctttcattggatattggttgtctatacgttattagttactttgcttgcagtagtagtgccgaaattgactgaaaaatataccaatcgagcaactaaagctgtttctatccaaaataagcaatttttgcagttgttagaaaaatggttcaagggtttagatgagctgcgacgctaccagaataaagttgttttgaaaaaggtggtgggacaacagagtcagaaactagagcagagtgaatatcagcgagataaattgctacattatactagcttagtgtctgcgatatttaatatagctggtcgtgttggtgttccatttattgctggaattttgtttttcaatcatcaggtaaatttaggagcgattctgacagcgggatattttgccaatggaattttttatagtgtagatagttgcgtgaacagatatacgcaattaaaatcaacgaaaactttgcgggatgatctggctaaattgcaaaagtgtttaccagaaaaagggtatgattctttaaaacaaatcactaccgttcaaataaaaagcttgtcagtacaatatccaaatggtgaaagaattacttatcctgactttgaactgaagaatggtgaaaaggttttattgactggtgattcaggtacaggaaaatcaactttattaaaagttttgttagggcaaattaagccaagtacgggtgaagtaatctattgcaataaaacaggaaaaaagatcaaacctgatttacgtcaattaggttatttggcacaggacttattgatctttcctggcagtattcaagaaaatattactatgtttaagcctaagcttaataaaaaaactgtacaagtgattcataagacggtttttgatagtgatcaagcgcgtttgaaaaatgggatagagacacagcttgatccacaacaggaattgctgtctggtggacagaaacaaaaggtagttttaatgcgggcgttgttgcatgagaagccgattctgtacttagatgaagcaactagtgcaattgatcaacaagcaacgacaaaaatcttccaaaacttaatgcaaagtagagcaacaattttggccgttgcacacaatttaaccgtagaacaacgagcattgtttgatcgtgaagttcacttggagggaaaataatgagtagcaaagaattatttaaacttaatccaattaaattctgtctggctatgggactacagattattgcagcagttggcgaagtagttgtagattatgtgttaactttgcaatttgatgctgccaaaaatagaaacttgagtttatttttaacttggacattaatccagctgtctagctatgtcatggtattcttattctataatttggcgggaatcatttggcaaaagttgattcaaaattacctgcatttaattcggcaagaactaacagatcattattttgccgatagtcaaaagcatgcggttagtgcagtgcaaaatcggatgactaatgatttgaaactgttacataatgactatttagattcgttccgctatgtagtagggatgctagccggtattgtcggtgtagcctttagcttggtgacttttcagtggagtttgttagttgcttgtttaatttttgccgcaattcagatttatttacctaaattactggataagccattacaaaaagctactgaaaaggtatcagtagctaatcgaaagtatttgaagactttaggtgattggttaattggcttatcagaagttcgtcgctatttggctagcgataagctttttaagactattgctgaaaattcaggacgcttggaagcagcaaatattgagaaggaaaaagtagatcaggaattagattatctgaatcaattggcttattcattaggagatgtgctaatctttcttttaactggatttttggtagtaaataattgggctgcttttggtttgattgccagcattggcaacttcaatggagcactatttggttctttgcaaggagttgctaattatggtggaagaatgcgagcaacaaagaaattgcgagaagagatttttgtagctaaaaagaaaattcagtctgaacagaaaagtaatttagaacaagcggttagtttttcaatccataatttagctatcgattttagaaacggtgaggccgtgactttcccagatttccaagttaaagctggagagaaaattttactaacaggtgattcaggtacaggaaaatcaactttactcaaattgattttaggtgaattgcaagccagtcgcggcaagattcaatactttaatcaaaagggtgaaaagattcaacctgatttagctgaaattggctatttgccgcaagatccagtgttattcccagtaacgattgttgaaaatattacgatgttcaattcaaaattgctaagtcgagttaaatcagccattgaaaaagttcaatttgcaggagatattgctaagttttcggccggcattgagactaagattggccttgatcaattgaatgtttctggtggtcagaggcagaaaattgttttagctagaagcatggtacaccagagtaagttgattttgattgatgaggcaacaagtgcaattgatcaggcggctacgatgaaaattttgcgtcagttgactaagacggatgcaacgattgtattcattgctcacaactttaatcaagaaatgcatcaattgtttgatcgtgaaattcatttaaagaaataaaaacaagctcataaccacaaagttacaggttatgggcttgttttattatagccaaatttgttcgaaaatatcttctttaaaaccgcaagttaaattactgtcatcaacgactaatggccgcttgattaacttaccattttttgacatcatatctgcagcttcttcaatcgtcattgttggcactttttctttcaaattttctctgcggtaatcttgaccgtgtgtattgaagaaatattttagaccacgatcttgatatttggtcatccattttaccaagtcttctttttttggtggctgttcaactaaatcttgaaattcgtagttgacctgatggtcatccatccacttgcgtgctttacgtgaggtagagcaacgtttataaccataaaatttaatcattattttccgtccttatttttgtaaaaattttctaaaaaattcaatttcttcatcatttgcgatgtcagctaattcatctttttgatcaacaaagaaaacatgaccacgtggattttcctcatcgccataagatttgcaaatagcatgaacgccgcggccgagtaagaagccaaacagggtaaattgcatgtcatgtaagaaatctttgttggcagtaatcaaaaaagttggtaggaaattatgattgatatatttttcaacatcgagttgttcatgatacttgttaactgcatttttagtgaagtaggcgctagccatgccatctaaattgcttggggttaacatgaaggaagcagcacaattcaagccgacagccctaaattttaagttcaatggtttgtaagaaaataacttggcataatctggattagtcaaaatagtgacatactgctcagccatttgaccaccggcgctgtcgccaacgataaaaacgttgttgcgatctagacgatattcttcagcgtgctcatcaacccaatgcatgtagcgatcaacatcgtctaattcatcagggaattccgcgttttctggtgcaagacgatagttgggattgatgaaagcaaaaccgcgcttagctaaacccattccataatattggtagatttctttagtaccataaacccaaccaccgccgtgaatattgatgatgacagggaagggagcttcgtgctttttgggtaaataaacatctaaagtatgccacttttcatctggaccataaggcagattatcaagacgttcaacttcagggatgtcgtgaggcaagccactgtcacgtttggtgtcatgctgatatgcaccatctctaaagtcagtaacaaactttttgattttatctttaagttccataattgttctcttttctaataattatctatgttaactcaattatactttaattgaatttgaaaaaataaaaacttttttgaaaaatcctcttgcattttaattaacgtttccctataatagtctatgttctgttgaggacgtacaaacatacaagatggtctggtagctcagctggatagagcaacagtcttctaaactgtgggtcgtgggttcgaatctcacccggatcataaattatgcctgtaagcattggtcttacaggctttttacataccttaggtatctatgtgctaaattttactacaaagacaatatttttttacatttgatattgtatgatacaaatatatgacaattattaacttaatcttacattattagtgaatcagttgactaaagtttggaacgagcttattctaaaattgatttccaaaaaataggatcgacaagtgtgaacgacaactatttttaacattatcggaggaattaagattgactacaaccaaaaaaatcattgttagattggcatgcgcgactgttcttggtacggcaggggtagcgctgacacaagtaaatataccacaaactgcagttgtgaacgctgcaactacctctgttgcagcccgcgcacttggagttgatgttgctagttatcaaaacgctgacttgtcaagtcatgcgcaagctggagcacaatttgcaattgttaaagttagcgaaggtacttcctatcgtaaccctaaggcatcaagtcaaatttcaacggctttatcaaataatatgatgccaatggcatatcactttgctacttttagttcaaatgcaagtgctgctgctgcagaagcaaattatgcagttcaagctgcccaagcattcggcttacctaaaggttcatatattgcttgtgattatgaaacaggttcgggcaataacatttacggtggtaaaacgccaacggctaatgcaattattgcttttatggacactataaaaaatgcaggctataagccacttctttatgctagttcatcagttttacaaaataatattgatactaatagtgtaattgccaagtatcctaactcattgtgggtcgcttcatacgctatttcaggtagaattgatagtccaaacttcaattacttcccatcaatgaatggcgtttcaatttggcaatttactgataattggaagggattaagcgttgatggaaatattgctgttttaccattatcaattgacggtaatgtaacttccaacaatggcgcaatttcacaagctccagctaccagcaacaccaattctgctagctcttcaaatgcttcatcaaatacttcgaataagagtacttcatcagatgatgataagggttcagcaactgctggctatgtgatgaagaaatcatatatctataataaaaagggtgagcgtcaaagcggctactatgcagcttatactaatattactcattatggtgtagtgactcttgataatggtaagactgccttaaacatgggcaatggtcgttacattatggcaagtaatgttttaggtaattcacgtgtacttaagcacaatgcttatgtatataataacaagggaaaccgcgctaactggagagtgcttagaaaaggtacgccaattaagacctatggttcacggatgcgcgttaatggtaaaagctgttaccgaatcggacgtaacatgtacgttaaggcggctaacttttaattaaaaaattgaatttatcaagaaggaattaagcttaaaggtttaattccttttttcatgccgttttttgtataattaaaagtattcaggaaacgcctgaattaattaactgatagggatgaaataaacttgaaaaaaagatttatagcaataatattgatgctactgactttaacgggttgtactataaaaagtactacgcctaagaaggctaagtcgtcagttaaaacggttaaagtcgataaacagcaatctaaggaaaaacaggctaagtatcaagtgatagaccaagtttggcgaattcaacaagatggcgttgatatttatggtcatatatatctaccacagggtttagctggtaagaagaaagcagtaattttggctcacggattggcaggaaattaccgtgatctaaccagttatgctaaatatttagctagttgtggctatgttgcctatacttttgattttcctggtggagctaagaatggtcaaagtagtggtgtagatcaattaaagatgtcaatttttacagaagaaaagaatctacagctggtattaaatacaattaaaaataggactgatgttgaccgtaaacaagtgtctttgctaggcgagagtcaaggtggagcagttgccgcaatgctcgcaagtaaatatccgcaagaagtaaagtcattgattttgctttaccctgccttttcgatcactgattatgcgaaagcggcttttaaatcagaaaaacaagtgccagacaagctcaacctatttggcttcacaattggtaaggcctattttgaaaacttgttcaagtataacttgttaaaagaagcaactaagtatcatggtccagttttaataatgcatggtacaagtgacatgattattccagattcttattcaattatggctaataaaaaatttaagcactcgaaattatacttatttaagggtgcaggtcatgattttaaaggtaaatatcatagtcgagcagatactttaattgataaatttttgcagaaaaatgggaaataaataatgaagaagaaataccttggtttattggctttattaagcctattgagcgtttttgctatttggggtcaaagcgttagagctgatgttgattatgatattgataatgttagagccatagcaagagttaataaagatggttcactgacaatgtatcgaacaattaagtattcatttgatagtgatgctcgtggcctttattataagcaaaatctggctgtaaaacagaagttgagcaacattcaggttaaggtcgatggacaaaatataaaggccgcaacaacgggcaaaaataatacgtataaattgcaaaagcagggcaattcttataattttaaggtttatcatcgaattaaggaaaatgataaggttaaagttgagtattcttatctaattcaccgggcaattactaattatcttgatacagctgagctgaactttaaaatagttggtaatggttgggatactgacttagatcatgtgcgtgctgaagtgatttttcctggggcagttaaggggctaaaagcttgggctcatgggccactaagtggttacactcaggttttgccaaaagagggcaaaattattatgactgctgatgatgttgcaggagatagtggtgtcgaagtacatgcgatttttccaactacggtaactagtgctaatcagaatattgttaaagaaaataagaaaagagcaattgaaaaacaagaagcagcattagcaaaagaagctaatcagaagcgtcagcgtaagcagatgcttagtataggattgatgatcatttcagtacttgtcggttttgtggtgataattagaggcttttttattaaaaaagttggggttaagccaaaaatagagcgcgatttagtacataattatgaaattccagatatatcacctactgctgcgcaaattttggatgaagctgataaaccaaatgttaaagcatttacagcttatttgatgcaattagccggtaaaaataaaattaagatcgaaaaatatcaaactaaacatttaaagcggactaattatcgaattactttagtagatgatagtgttttgactgatgacctattagattttatttttaacaaagttggtgatggtaagtcatttacaacgaaagatttgcgggattatacttctaaaaaattgggtaggcgttttgataaatggtgtgacgggcaatataagcaagttgaggataaggacttgcttgataaaaaatataaaaagcagcgtagcaacttccgaacggggatgctcatgggaatgattgctagctttgcgatctgggtaattagcttaatgatggcaaataatatacccagttttgtgataataattggaatcatgatgatcgtcttagaagttgctgcattcatagtgggcaattctcgtttaagtatttatacccaaaaaggtgcacttgagacagatcaagttcgctgctttaagaaaatgctagacgatattggtcaattcaagatgaaagacgtcggtgatctgattttatgggaagacattatgccgtatgctgtagcgtttggtctatccaaaaaggtattgaagcagcttaagattgaatttgcagatgaattagatgctgcaccagttctgttttatagtggattctatagtagcagtagtgacagttttgagcatagttttgaacgtagcttctcttcaggcgtgtctactggtttatcttcagtttccggaagctcaggtggattttcaggtggatcgtctggcggctttggtggtggcagcggcggtggtgctttttagtgagaaatttttatactataattaaactaaaaaaggagggctaaattatgccatttgtacatattgaattaattaaaggtcgctcagatgagcagattactaacttaatgaaggatgttactgaagcagtgcacaagaatactggtgcgcctaaggaacacattcatgtaattatcaacgaattaggtaagcatacttatggccaaggcggcgagtggagagcttaataattagaaattgtagtaaaaggcgactcgattgtgagtcgcctttttatatagttaaatatataaacttgtattagagccttaaagctatgtgtgcataaatgaattatttatttagaatcccacgtaatataatgatgttgatgtctagatatttacgaggaggatttgaaatgaatttaaaaaagaaaattgcaatttctgcaactgcactgactgttgctctctctactgcatttccaattgctgctgcgcaaagtcagccggtaaaagcagtaggtattgtattggttcatcgtgttacagcaggtgaaaatttcgctaattggttcaattggcttagaactcgataaatagaaaaattaggaagcaggcaatataaagattgtctgctttttgcgtaaaaaaatttaatcactaaaacgatcaatcaattaacactacttcataaaaatcagtataattatgttcgttactattagtaagttatacaataaaagtggtgagaataatgtatgattatcgaaataatatcaaaataattttaaataaaactgaggctgatgataaaagtctcgaaaatagtttaagtgcgattaaagctatcctaaatatggccgaagataatacagctgaaaaatctgagactaaatcagtaactcaacctaagaataaaattgcaaatacacaatcaattgcacaaagaaatgcagatttaaagcaaattaagcaattattgattgggctgacagccttaattgagactccaggtgatgaaaaagctaaaaagagttcacttgatgctttacacaagttgacgtttgttccaggcgttggcaagcgctatggcaatgttttgggtaaattggatcaggcaattcaaaaatctaagacaactaaagaagctgttaacaagaaaatttttgaagaagcaatgaagcccaaagagcaacctaagcgcgattatcgtaaaggacgccgctatactgttattcgggctttatcaggctgtaatttgattaatgatagtggtcaaattgtttaccgtattaaagaatcacaaattcactctttgaatttaaagagcggtgacatagttgaagctattgaaaatcgagataatccaaattatgaagcagaagtcttgcgcgtggtgggttatcgcaaattgcgcatgcgtgattatgacccaatcgaagaattccggtatgctgtggtccgcggcaaggccaatcaattagctatcactagaaatattaagggcgaaaagttgagaattcgcggtaaggatatcacgattccggttgattcaagttattatcaaggtgaaaatattcatgttgaagatggttcaattgtagatctagcttggtatacgggtgatgttcgcattaagaaaaatcctgctgaggcagtacagattcgttggatttatcaagttgatccgcctaagaaatcagatctgtcgtatcaaaagaaaaataagtcaaagaaagaagaaacagaagagttaactaaactcgacatgaatttgcactatcagcgggtgggaattgcgattggtgataatcaaaatgaaggaatattagaagggattgtttcgcgctataatgggatcccaattccaatagatgcttttgaaggcaagaagaaggtaatggaacggcaaatcaaagacttagatattgtaatcttgatgacagcttatgctgctcatgatgctacttggaatattcaggaattcgcttcaaagtatggtgttaaatttgccgtttcttcatctaaaggctaccgctcttttgagcgagcattatatcgagctgaaaatggtttacctgcttatgaaggaacgcaatcaatcgattataaagaagttaaaaataaataatttgttaacattattttgtttgcttgagctaacagatgatttttcgttaaaatagtactaactaaaagaaaggacgcttaataatgaaaaacattaaacaacgttcctggatgagatggttggtatttttagcaggacttgaaataatcgcaatatcaatcaatcttttttatggaccgattaatattgcagctggtggctcaacgggtatttctattctagtcgatgcggtctgggggattaatcgatcaattacagtatttgtagtgaatggcttgatgctgattttggcggcaatctttttaggcaaaaagactacccaaaatattgcattaggtagtttgctcttaccagttttgatggaagttacgcctagctttaaagcagtgaataatgacctactagccgtaatttatggtggtgcattaatgggacttggagtttcgctactttatcgcgttaatgcctcaagtggtgggacaacaattccgccgatgattctgaagaaatatttttatttaaatcctgcaactacgcttttatgcattgatatggtaattattttcttgaacatttttgtcgatggttggaatgctttcttcttagcagcattttctcaagtggtaactgccattacgatgcgctacgcggagaccggttttgataaaaagtatcaagtcagaattatgagtaattcagatttagaccgaattcaagatatgcttaaagaagattatcaaggcctgacgatttatgatgttataggtggatatagcgacgaaagcaagcgtcaattattaatcgtagttgatccacgtgaatatgggccacttatttctaaagtacatgagatcgatcaggatgcgtttatcattaccgaaaatgttgcaaaagtgcatggcggtcaatggcgaatgtaaaaaaataattgatcttagtctaaaagcgttgtatgatataagagttgtatttgtggagacctccacatctgcaaccgcacggcttgaggttagaagtcttcttatgtaagaagcaccccagttcggcgagtctaagtatttttttcggaggtgtacaaatgtacgcaattattaagaccggtggtaagcaatacaaagttgcagaaggcgatagcgtatttgtagaaaagcttgatgctgaagaaggtagctcagtaacttttgacgaagttatccttgttgctaatggcgacgacgttaaggttggtactccattagtagatggtgctaaggtaactgctaaagttgaaaagcaaggcaaggaaaagaaagttgtaactttcaagtacaagcctaagaagcactcacacagcaagtatggtcaccgtcaaccttacactaaggttacagttgaaaagattgaagcttaattcagaggtgaaatgaatatgaacattttaggtatgaaattatacgctcaccacaagggtggtggttctactgccaacggtcgtaactcagctggtcgtcgtttaggcgccaaggctggtgacggtcaaactatccacgcaggtactattatttaccgtcaacgtggtactaaggttcacccaggcaagaacgtaggtcaaggtggagacgacactttatttgcacttgttaacggcgttgttaaatttgaacgtcttggcaagtacaagaagcaagtttctgtatacccagctgaagaagctaagtaattcagagattaacatgaaaaggcgagtagcataagccacccgtctttttttatggctttttccgcccagaaacatgtataattaaaccaatatcatacaaaaagagggtctctgagatggaaaataggcaagaattattatccttaattaaccagcgaattgagcatgtaactgatttaattaaagaagcaaatgcagatgcattgattatttttaatcaagctaattatcgatatctaaccaattttacaggggaagaagcacaattaattttgactgctagtggcgaacgagtacttttatcagattctcgttttgctggacagattaaagcacaagcacctggcgaaatggatgttgtaatgaaacattctagtgattatgaagaacttactaaggccttgaaaaaaatggacgtcaagagggtcttagttgaaggtgaattcgtttcagcgagtgaatatgaaaaacttaagcaactaaatccagaacttgaatttgtgatggttgaagaattggttgaacgagtacgtaatattaaagatgatcttgaaattgcggcattgcgcaaagcaattgatatttcaatggaaagctttaaaggtattttgccgatgattaagcctggcgttaaagaacgtgcaattggtgctaaattggactacctatttaaagttaatggcggcgatggccctgatttcgatacaattgtagcttccggtgtgcgttcggcttgggctcatggcgttgctagtgacaaagaattgtccgaaggcgatatgattgtcattgactttggtagtttttatcacggttatgcggcagatattactagaactgtttcattaggtgaagttgatgctgaaatgcataaaatctatgatattgtacatgaagcacaacgccgtggcattgccgcggcagttgcaggtaatactggatatgatgttgataaagcagcacgtgattatattacagaacaaggttacggtcagtattttggacacgggatcggtcacggcattggtcttgaaattcacgaattgtgtcaaccagctttaccttttagaactactaaattggtcaataatatggttcataccgtagaaccaggaatctacttgccagacaagggcggtgttagaatcgaagacgatattttggtccatgatcaaacgcctgaaactttatccactttgccaaaggatgaattgatttccctataatagctatttaatttatcgtatttatggtaaaaacgcttcaagattggtaagataataattgtagaaatgagggacttaatatgacaatgatttcagtaaacgaattcaagaatggcttgactattcaatacaacaacgatttatggcgcattgttgaattccaacacgtaaaaccaggtaagggtagtgcctttgtacgttcaaagcttaagagtttgagaactggtgctgtacaagaatatactttccgttcaactgctaaggttgaaactgcagacattcaaactaagtcaatgcaatacttgtacaatgatggctcaagttatgtattcatggatacttctacttacgatcaattagcaattccaaatgaacaaattggcgatgaagctaattacttattggaaaacatgattgttaacgtagttatgcacgaaggtgaaactttaggtatccaattgcctaatacggttgatttgaaggttgctaagactgaacctaacatcaagggtgatacttcatcaggtggtggtaagccagctactatggaaactggtttagtagttaacgtaccattcttcattaacgaaggtgacgttttaactattaacactgctgatggtacttacgtatcacgtgcaaataagtagtttatttgaggtaacaaaatggcagatagttcaaaaattcttttaagtggtgaagaaaacagcgagcaaattaaaattgatccaagtgttctagaagttattttgggtattgctgcagaaaaagttgatggtgttgccggaatgcgcggcagtttgaaatcaggcttaaactgggttttcggtcgtgaagatcatggtaagggcgtaaatattagtgttgatgacgataataagctaattgctgatatttatgtttatcttgaaagcggcgttaacgttcctaaggttgcaatgacgttgcaaaagaagttgaaggcacaattattgcaaatgactgatcttgagctgaaggcaatcaacgttcatgttgtcggtttagttttcccagaagatgaaaatactgaccagactacatcagagctgtttccggaggacgaagaagaaaaataatgaaccaacacgaaagtcgaaaagttgctatgcaagccgtttatttggctaatcaggagccagatttaactgccgaagaagttgaagcaaaagtcgttgcaacgcttaatttaaaacagctttctgcctattctaagaagttaatcgaaggcgtactagaagatcgcaaaaatttacagtctgaactaactagtcatttgaaaaagggctggcgtcttgaacgtgtgagtcaaactgtggtagccatcatggaagttgctttatttgaaatcaagcatagcgatgaaattgatgctaaggcagcagttaacgaagctttaaatttatgtgacgaatttgctgagcctaaagaaaagccatttattaatggaatgttagcaaactttgttaaatagcgatgaatagccggcagttttgccagttatttttttacaaaaggagaacgggctttatgggaaagattcttgatggtaaagcatttgcaaatgaattagggcaaaatcttaaagaaaaagttaagaaattaaaagaagagggaataacgccacatttttgcgtaataaatattggggatgatcctgctagcaagatttatgttcgaacaaaaaagcggcgggctgaaaagatgggaattatccaagatatttatcaaatgcccgctgatactaaacaggaagaagttttagcattaattgataagctaaatgctgatcctgagattaacggcttgatggtacagttgccagcacctgaacagattgatgcagatgccttgttaaaaaggattgaccctaataaggatgtcgacgccttaacgcctgcgaatattggtcaactttggatggaaaatcactttgttgaaccggctactgcagaaggcattattgctttattgaaacattatcaaattacgctggctggtaagagagttgtagttattggtcgaagcaatatcgtaggcaaaccagtagcggcattaatgttagaggaaaatgctactgttactgtttgccatttgtatactaaaaatctggctgaaattacacgacaagccgatatagtagtttcagcaacaggacaagcatttttggtaactgcagatatggttaaagatggggcagtggtcgttgatgtgggcatgaatcatgttaatggcaaattagtcggagacgttgactttgataatgttaaagaaaaagccagctatattactccggttcctggcggtgtaggtcctcttacagtacaattcttaatggaagcagttgttaaattgactaggagacaaaatggccgagaataaatatttaacggttactgatttaaattattatattacgcaaaaatttaagaatgatccttacctgcataaggtcttcttacaaggtgaattgtccaacttccgttatcggcgtaattcgcaccagtatttttcactaaaagatgaaaaatctaaaattaatgtggtgatgttccgttccttctttgataaggtgaaatttaaaccagaagaaggaatgaaggtttatgtggttgggtatgtcagcgtgtatggcccacagggctcgtatcagttttatgctgaacaaatggaaccggcaggattaggtgccttatatgagcaattgaagcagttgcaggccaaattagccaaagaaggtctgtttgatccagagcataagaagaagttgcctcattttcctgatcgaattgcagtagttactagtgcttctggggcagttattcacgatattatggttacagctaatcggcgtttcccgcatgctgagattgatttgtatcctgcgcaagtccagggtgatactgcagcggattcattagtgagagcaatgcgccagattgccgctcaaggcgacaagtatgatgtcatgatcatcggtcgtggtggtggctcactagaagatttgtggccattcaatgaagaagaggttgtgcggcaagtttacgcaatgcagatgccagtaatttcttcagttggtcatgaaacggatactaccttgtgtgatttggtggccgatgcgcgtgcagcaacaccaactgctgcagcagaatatgctacgcctaatacattggacgaaattgcgcatattaagcaattaaccagccagttggtagctagcatgcaaaatattattcgttcgaaacgtgagcgcttaagtcgggtgcagaattctgtcatcctgcgcgagccgactagactgtatgatcagcagattcaacaagttgatcaattaaaacaaaggctgcaaaatagtatgcaaaatcggttgacccattctgtccaaggttatcaactgttgaagcagcgtttgtttagcgttagtccagataagagaatcggccagatgcagcaacaagagcattttttacagcaacgactgattgataatatgcagcactatttgaaaaataaacgcaatagttttacccaagtaatgcagcagttggatgactatagccctttgaagacgctagagcgaggttttgtttattcaactgatgaacaagggaaaaccattagttctgtgaaacaagttcaaaaggatgatcatttgcgattgcattttaaagatggacaagttgaagcagtggttacaaaggtaaaggaagaacaaaatggcagtgaagaaaaataattttgaagaacaattaactaatttggaacaaatcgtgcaaaatttggaaaacggaaatgttccgttggaagatgccctaaaagaatttcaggagggcgtaaagattagccgtgatttagaaaagaagcttaacagtgctgaagaaactgtggctaagttgattgatagtgatggcacagaacacaaattagatccaaataacgcatcagcaccagaggaataaatatgacagcatttacttattttaaagatgaatggaccccagtaattgatgattatctggctaagcatttggctagtgaggttgaagatcaaaagatcagtcagattatggcctactcagtgatgggtggcggcaagcgcttgcgtccgttattgtttttagctacgttaaatgctttaggcagaaagattgaagaacctgaaattaggattgcctgcgggattgaactgattcacacttattccttgattcatgatgacctgcctgccatggataacgatgactatcggcgcggtaagctgactagccacaaaaaatggggcgaggctgaggcaattttagctggggatgcgctcttgccgatgggaattcaatggattgcggaaggcagtaagtcggcgaaattggtagatttaattaccaaagcagttggccctaatgggatggttggcggtcaatatttggatattgattcaactaacaatgctagtgttgcgggtgatgccaagtttatcaataagatggaatggctgaagaccggttgcttaattcaggctagcgttgagatggctgcagtttatgcaggagctagtgatattgaacaggtaaaattagtcgattttgccaaaatttttggtcgttcataccaaatctatgacgacttggttgatgtcgttgaaactagtgcagaagctggtaaagctacgcacaaggatgaagctgaaggaaagaataatactttaactttgttaggaattgatcaaagtcgcaaagaactaactgacttaattaagcaagcacaagatgatttgcatggactaaatggcgaagtgctaactggctttttagatctttatcaaaaggtgttataaatggcaaaacaaagagcagatattttattagcagaacaaggaatttttcattctcgttcagctgcccaaagagcgattatggcggggctggtttctgatcacaatcatcaacgaattgataagagcgggactaagtttcctgaaggggaaaagttttacgtgaaagatgatggtaagaaatatgtttcgcgtggcggctttaaactggaaaaagctcttaaggtctttgacattgatttaacaaataaaatttgtttagatattggtgcatcaactggcggttttactgatgttgctttacaaaacggtgctcagatggtctatgccttggatgttggctacaaccagttagcttggcaattgcgggacgacccgcgtgtagtggtgatggaaaagcagaatttccgctattcgaagccggaagattttgatcaaggactgccagattttgcaatgaccgatgtgtcctttatctcgttagatttgatcatggcaccgatgtatgcaattttgaagaatcaatgtgatgccgtttgtttgattaaaccacaatttgaagctggccctgagaatgtcggtaaacacggtattgttcatgatcatgaagtgcacaaggcggtaatcgagcacaccatgcaaaaggcattggagatcggcttcaatgttttaggcgttgattattcaccaattaaaggtggcaaaggcaatattgaattcttgattcatttacaaaaagacgaagcaaatggtggccgcaacttatggcaagggagcccagctgaagtggttgagcgcgccgtaagtggtctataggagtgaagctatgctagttgagctagatatcaaaaactttgcaattattaaaagcttaaaggttcgttttcaagaaaaaatgacggtaatcatcggtgaaactggtgctggtaagtcaattattattgatgctgtttcattactgatgggtggtcgcggtcaaaaagaaatgattcgttcgggtgagtccaaggcgattattactggcttgtttgaattggatgatcaaaaagaaaagatcgcggaattgtgtgatcaatatggtttgccgcacgatgacgatcagctggtgattagtcgtgaattagctgtcaagggcagaaatgtagtccggattaacgggcaattgacgacgattaatgttttgcgcgagattggtagctatttggttgatattcacggccagcatgatcagcaaattttgatggatcaggaccggcagattgacctagttgataattatgcccctgcttcttttaaggcagatttagccacttatcaaactgattatgctcaatggcaaaagctaaccagtcaattgctgcacctgcgtcaagatgcccaagaattagctcagaagcaagatattctgcagtttcagaataatgaattggaagcagccgaccttgaggatccacaagaagatgagaaacttgaggaagaatataacgaactaaataattatcaaaaaattgcggatacggcgaattacttcatgcaattgtatgatgacgatgagcatggaattgcaactttacttggagatgcgcaaaatgctgcgactgatttaactgaatttggttcaaaatttaaggattttgctaagacagttgatgatggagtttatgctttaaatgacgcccgcagtgaattatcgaacttaatggatgcaatggacttcgatgaggaacgttttcaatacgtgactaaccgcttggataccttgaattcattgaaaaagaagtatggcccaaccttggctgatgtgtttgctttttatcaaaaagtacaaaaagaactcagtcaatttgaaacaggcggccttgatgaggaaaaattgcaagcagaagttgccaagattgaagaaagaatgacccaagaagctagagatctgcatttaatacgcgaaaaagtggctcattctctggaagagcagattaagcaagagttagctgatctctacatggaaaaagctcgcttttctattaattttgatgaaacaaagacatttaccgataagggaactgatgcgattgttttcttaattgcacctaatccaggtgaagatttaatgccattagttaaaattgtttctggtggtgaacaatcaagattgatcttagctttgaaggcaatcttcagccgagttgaaccagtgggtaccatgatttttgacgaaattgatacgggagtttctggccgagtatcggctgctatcgggaaaaagatgcactcaatcggtcgcaacaagcaggtaattgcaattacgcactcaccacaagtggctgccgcgggtgatcaacgctacttggtagctaagcaagtaaaagatggttcaacctttactcaaataggcccacttagcaaggaagaaaccattacagcgattgcacagatgatggctggacaagatgtaaccgatgcagcaaagaagaatgctgcagatttgattaagagtattaaagatgactagtattagtaaattttggcgtgatttttgtgtagaacatcaagtaagtcctacagcattagaaggtgcttttgcttttggagctaatagccgggatgcagatattcttagtgatttggtcaaaagtggaattaagacggcaacgactagcctgtattctgcgcaagaagatgtaccggttgtagggatgtacgcaattgttttaaatggacgaaatgaaccagtttgtgtgattcaaaataagactgttgagattatgccatttaaaaatgtctcagctgagcatgcctatttagaaggcgagggcgatcgctcatatgaatcttggcgtaaagtacacgagaaattttttgcgcgcgaatgtcaagaactgggacgagagttcacagatgaaactgaagtagtgtgtgagacattcgagaaaataatttagtaaaggagcagacgattttgtctgtttttttgtatgcaaagagaaaacttgaaaaagaaacaattttagtgcaaactagatatattacaagttaagaggagttcagcatggcagataaaggtttattacttgtgctttctggtccttccggcgttggtaaaggaactgttaaaagcgcgattgttgaaaacaaagtctttccatttgaatattcagtttcaatgactacgcgtcaaccgcgaccaggtgaggttaatggccaagattatttttttgttagtgaagatcgctttcaagaggctattaaaaatggtgagttgttagaatataataaatatgtcggtcactattatggtacacctcttgcaccagtgaagaagatgcttcatgatggcaaagatgttttacttgagattgatgttaatggggcacaaaaagtacgtgaaaagatgcccgatggcgtgtttatctttttaaccccaccagatctacatacgttacatttgcgtttggaacaccgtggcaccgagtcagaagatgtaattcgtggtcgaattaagcaagcgcgcaatgaaattttggagatggaagactatgattatgcagtagttaatgatacagtagctaatgcagttgatcatattaaagcgatcgtcgatgcagaacatgtcagtgttaaacgtgtaattgatgactatcgtaagatggtcaaggaggattaattattatgagaattacttacccatcaattgataaattattgtcacgtgttgattcacgctattcattatctgttcttgccgctaagagagcacatgaacttgaagctggtgatccaccaactttggaacattttaagtgtgataaggctgttggtaaggcacttgaagaaattgctgctggtaaagttactgttgacccagctcatgccgaggttaacctcgaagattaatttattgaccttcatcctttggggtgaaggtcttttttacaggtgattaaatgattgctcaggttattgttgatgtagctgcacggcaaacagaccgtatttttgaatatcatattccaacagaattagaaaaggatattgcgattggatcaagagtagttgttccgtttggtcctcgtaaagtgcaaggttttgtggtggggatcactgatcaaagtgaatttaaaggtaaacttaaggatttgctagttgtggtagatgagatgccaccgcttacgccagagttggtaaagttatctgctgatttagcaaaaaatattttttcttaccgaattaaaattttacaagcgatgctaccttgggtaatgcgagcaaattatcgcaaattgctagtgccagctaatgatagagctgccaaaatgccgctgtttcagggtgatccaattgatttaaataaaattacggatctggcggagattaagcaattccgcaaattattgcaagatgatcaagcaaagattgagtatgtggtagaaaatcgagccaagaagaaaaaagaaaatcaatatgaactagcattaaaaaaagaggaatatcccaaaatttacaatactttacgtcaaaatgcggtaaagcaaaaaaagttattgatggatatcattgataatgcagcggattatcccaaaagccaaagccagctagaaaaacagcttggattgacggcggcgagtttgaattctgcgattaccaaaggttggttgaataaaaaaagtgttgaggtttatcgcgatccgttatccggatttgatgacggagaacataaaacagcggttaccttaaatggtgagcagcaaggtgctttgaaccagatcacccaagcaattgaacagcgccaggctgagacttttttgttggaagggattactggtagcgggaagactgaagtgtatttacacgctattagcaaggctcttaaacaggggcgaaatgcattaatgctggtgccagaaatttccttgacgccgcaaatggttcgtcaggttaaggcacgttttggtcaagaggtagccgttttacatagtgccctatctgagggagaaaaatatgatgagtggcgccgaattcgtcgtggcgagactaaggtggtcgttggcgctcggagtgcagtttttgctccactagataatattggtttaatcgtgatcgatgaggaacatgagtcttcatataagcaagaaaccgatccacgttataatgcacgtgatgtggctatttggcgtagtaaatttcataattgtccgttggttttaggaagtgcaacaccatcgttgagtagccgtgcacgcgcccaaaaaaatgtctatcatcttttacggttaactgaaagggctaatcaaaagaaattgcctaaagttaatttgattgatctaaagcacgtgcagtttgctggtggtcaatttgatttatctgttgagctagtagatgcaataaaaaagcgtttggcaaaaaaagagcaggttattttaatgctcaatcgacgtggttttgctaattttatgctttgccgtgaatgtggttttgtattaaaatgtcctaattgtgatgtttctttaaatttgcataaggatactaacaggatgcaatgtcactattgtggtcatactgagccagtacccacacgttgtcctaattgcccaagctcgcaaattcgttttttaggtgcaggtacacagaaggtacaagaagaattagaagagcttctgcctggtgcacgaatcttgcggatggacgttgatacaactagaagaaagggtagctataagaaaattctagatgcctttggtgctcatgaagctgatattttgttaggtacgcaaatgattgctaaaggattagatttccctaatgtaactttagttggagtaatcaatgccgatacaggattatggctttctgactataatgcttctgaaaagacttttgaattattaactcaagtagctggccgtgcaggtcgtgctgataaggaaggggaagtcttaattcaaacttataatccagagcattatgctattcaactagctcaaactcaggactacgaacgattttatggctatgagatgaatatgcggcatgctggtaactatccaccatatttttataccgtgctgatttccattgctgctaaaaaagaacagaatgcagctcgtgaggcttttaggattaagaggtatttgaatgagcacttgcatgagccaacgattattttgggaccaacgccaagtgcaatttctcgtgtaaaaaataaatattattatcaaatactggtaaaatataaaaaagaaccaaatttaaatgaattattacaccatgttcaagattccgcgcaggaagctaagaaatatggtttaagtatttttattgataatgaaccagagagaattatgtaaggggatgctttaatgacatcaataatatttatgggaacaccgaaattttcagttccagtacttgaagggttaattgatgaaggctatgagattaaagccgtggtcactcaacctgataaaaaggtaggacgtaagcagaaaattactaagtcaccagccaagatcgcagcagaaaagcatgatttgccaatctttcaaccggttaagttgtctggatcagacgaaatgcagaaattaattgatatgcatgcagatttgattgtaactgcagcatatgggcaatttttaccaactaagtttttgaattcggttaaaattgcggcagttaatgttcacggctcacttttgcctaaataccgtggcggtgcaccaattcaatattcactaattaacggtgataaagaaactggaattaccattatggaaatggttaagaagatggatgctggtgatatttatgctcaagaagcaattaagattgagcctgatgataacgctggcactttatttagtaaattatcaattgttgggcgggacttattgcttaagactttaccagcaattattgatggctcaattaaaaaggttccacaggatccagaaaaggtcgtcttttcacctaacatcactaaagaacaagaaaagcttaatgttgatatgacagcagaagaggccaacgatatgattcgtgctttgaatccagatcctggtgcttatttgatgattgaaggcaaacgtttcaagatctggaaggcagaaattgcatctgattcatcaagtttaaatgccggctctgttgttgctaacaaaggacgttttgccattagttttgctgataattcagtacttaacttacttgaagttcaaccaagtggcaaaaagagaatggacatcaagagctttttaaatggtcaaggtagtaagtttgtcccaggtgaagaaattgtcgatcgataagagtgcacgtgcagtcagcttagagacattgatcaaggtcttagatcaaggctcctattctaatattagtttgaataacagcttaaagcactctaacttgtcaattgcagaccaaaatttagctactaatattgtttatggcacgattcagtatcgattgtttttagaatatcagttaaaaggcttagttaggacaaaactgaccgaaaaatatattaagccattattgttaatgtcactttaccagttgatttttttggataaagtgcctgatcgtgctgtacttgatgaggctaataaacttgctaagcaatatggcaagcgacattcagctggctttcggttggtaaatgggattttgcgttcgtttactaggcgcggggtgattttaccagctgaaaataatccagttaaatatttaagtgtcaaagagagcgtacctgaatggttagttcaatatttaattgataactggggcctagacaaggcaaaatcagttttaaacagtattaatgagccagctaaaaacagtgtacgtatttcaaagttggcagataaagagcaagtttttgcccagttagagcgggataactatcaaccacaatggtctaagttatcaagagatgatgtgattttgagtcacggtggcattagcgaaagtgatttgtttgaagaaggcaagttaacaattcaagatgaagctgccagtttagtcgtagaagcttttgactttgaacaagatgagcatgtgcttgatgcttgttctgctcccggtgggaaaaccgtgcaaattgccgaaagcattgttaatggtgatgtgactgccttagatattcatgataaaaaattacgtttagtacgagataatgcccagagaatgcacgttgcaaataaggtaaagactaaggcatgtgatgcacgtaaggctacagagatttttgcggcaggtgaatttacaaaaattttagtcgatgccccttgttctgggcttggattattgcgtcgtaagcctgaaattcgctatactaagagacaacaggacttacaaaatttacaaaaaattcaattggcaatcttaactgcagtaagttcactcttaaaaaagaatggcgagttggtttattcaacttgctcaatttcaatggaagaaaatgaagaggtagttaagaagtttttgcaagcacatcctgactttgaactagttccatttaagttaactaaacttgaatcaaagacagggatgttgaaaataatgcctgatctagatggcaatgatggatttttcattgctaaatttaagttacgaggttagatttttgattgaaacagcatacgcttcgagtattggtaaggtacggaaaagcaatcaagattttgtaaaagtttttaaaaatcaaaagggaattgtcttagcaattgtctgtgatggtatgggcggccatcaaggtggtgacgttgcttcaacaatggcagtcacccatttaggacataattttagtatgactgactttgcagatgctaatctcgctcataaatggcttgatgtgcaattaaattctgaaaatgaaacaattttaaagactgctgataagtttcctgacttaaatggaatggggacaacgattgtattggcgtttgcatttgataaaaatgccttaattgctcatttaggtgattctcgggcttatagttattctgaaggtaaatttgtccaattaactgaagatcattctttggttaacgaattagttaagatgggtcagattactaaagaacaagctaaacaccatccccagaaaaatattattacgcaagcattaggcgtctcaagtacgattgatcctgaatttgatgagatcaagatgggggaaaacgacattattttgctctgtactgatggcctaaccaattcacttagcgatccacaaatccaacaaattttggcaactaaggagcttagcttaagagaacgttgtaataaattgattagtgaggccaatcgattaggtggtggtgataatattactgtctgcttaatttggaacaaggaggacgagagcagtgatcgataaaggttatctgcttggggaacgttaccgcatcatcgataccttaggtgaaggcggaatggccaatgtctatctagcggaagatattatcctgcaacgtaaggtggcagttaaaattttacgccttgatttgcagaatgaaccgcaaacccaagctcgttttcaaagagaggcattagctacaagtgaattaagtcatcctaatattgtttctgtacttgatgtaggtaccgatcatggtttgccatacatggtaatggagtatgttgatggtcctaatctaaaagaatatattcaaaaaaattcacctttggatttaaatgaaattattcgaattatggatcagatattgagtgcagttgcattagctcataagcacaatgttattcatcgtgatctaaaaccacagaatattttgatggataagcgcggcaatattaaaatagctgatttcggaattgccgttgctttgaatcaaagctcgattacacaaactaattcagtaatgggttcagttcattatatgtctcctgagcaaacgcgtggcggaatggttactaaacaatctgacatctattccttgggaataattttatatgaattgatcacaggaactgttccgtttaacggtgatacaccagtggcaattgcactgaagcatgcgcaagaaccaattccttcaattcgcaagaaagattcaagtgtaccacaggcgctggaaaatgttgttttaaaggcaaccgcgaaagatccacgagatagatatgctacagctcaggaaatgaaagcagatttggatagtagcttggatcctgaacgggcagatgaaccggtttttgtaccatatcatggtaataacgatgataaaacaattgtattgcctggatttaagccacaaaaggaagaaaaagaagtggtggagccagcaaaaaccgaatcagtagaatcaagcaagctagtaaagaaaaagacttttttacagaatgtcaaaagtcacaaatggtggtggctgatctcaattattgccgcgggtttaatcatttttatgatgattttcgctttaagtggtactggaaataaacgacaggatgttaatattcctgatgtaactaatattgcagaaaaagcagctgagagtaaacttgaagcagcaggcttacaggttggaaaaattattaggcgacaatcagatgatataaaaaaaggccgggttattgcgacaaaaccaactgcaggcaatagtctagagcggggaaagagcgttgatttaattgtttccagcggttctagcatggttaaagttcctgatatggttgggaagaactatgccgaagcggcagaaaaattagaaaatatgggctttaatgtagttagagaggaccaatattctaataaagttgacgaaaatcaagttatttctcaaagcattgctgcaggtgtagaggttaagccgacgcagactacaattacgttgatagtttcacgtggcaagcaggctagatcacattcaaatatggttaccttgaaagacttaagtaattattctttgaagagtgctcaagactatgccaaagaacatggcctgactttacaaatcaatcaagaatattctgatgatgttgagaagggcttagtaatttcgatggagccaggtccgggtactaaggttgagcgtggttcaactgttaccatcaagatctcgaaaggtccaaaggaagacaaggaaactactgtaactaagacctttaccgttaactatgttggtgatgatctttctaagagtgagaagcctgataatgataaaggaagcaataactctgagtcagaatccgttaatggcaagggtgatcatgtccagatctatattaaggatgatgatcattccttgaacaatatttatcgtgacttgtatattaagcatgatatgagtttctcgattccatttaacattagagaaggtagtggacaattaaaggttgttcgcaatggcgatacagttttgaatgaaaaggtgactaaataaatgaaactagcgcaaggaaccgtcgttggtttgattgctggttattatgatgtagaaaccgctgcgggtatcgtgagaacgcgtgctcgcggcgtttttcgtcaaaaaaagcaaaaaccggcagttggcgatcatgtggaaattcagatagatgataaaggaatgagctatctggtgaaaatcttgccgcggattaatcgaattgggcgaccagcagttgctaatgtaagtcatgttttgttagtaatttctgcagtagaaccggatttttctgtagagctgttagatcgttttttgactttcttttcttggcaaaaagttggtgtaacaatttacttgtctaaagcagatttgctatcagaagcaaagttaaacacaatcaagcaagctttagcatattatcaaaaaataggttatcttgttttcactgattatcatgaaatgcaaattcagattcctaaaatgatcgaaaaaaatcaaatttggactttagcaggacagtcaggtgctggtaagtcaactttgcttaaccatttaaaaaaagatgctaatcaagcgactggtgcgatatcaactagcttgaatcgtgggaaacatactactagaaaggtcgaactttttaagttaggcgcgggctttttagcagatacgccaggtttttcgtcaattgatttgacaccaatcaagttgaatgagttatgtaattactttgttgagtttaaaaaggcaagtattcactgtaagttccgcggatgtcagcatttgcaggagccaggctgtgaagtaaagaagttacttgaagccagagaaattctggaaagtagatatgaggattatttggctatgcggactgagattagcgaaggtcgcataccggaatatttaaaatagaggtaatagctgatgatgattgcaccctcaattttgaacgcaaataatattgatcttaaaaatgatattgaaaatgcagtccaggccggaattagccgttttcatattgatattatggatggacattttgtgcctaatttatcttttggaccgcaactaatcaaagatttcaagcgtgaatttccgatgacagatgctgaaattcacttaatgagtgatgccccagataagttggtaccagcttttgttagtgcaggagcagatttggtcgaaatacactatgaagcaatggacaagcctaagttatattattggttcgattatttagcttctaatggcgttgatgctgctttggcaattagtccagatacaccagttgaagtggttgaaccgtatttgccattactgaaacaagtattagtaatgacggtcaagccgggatttggtggacagagttttcttcctgaatcagttagtcgaattaagtcagttagagagattgtcggctctgattttgatattgaggtcgacggcggtattaatgatcagactattaaattagctgaaaatgctggcgctaatatatttgttgttggttcatacttgtatgaaaatggtgatgttggcagtcaagtacataaattagaaaagattattaagtaatgaaagcatatgcattgttgggcggtccaactgaattgtggcctgaagatattgaagaaaagctggctcaagctgatttagttattggggttgatcgtggtgccttgtttttagaagaactgggaataatacctgatgtggcagtaggtgactttgattctttacacgaaaatgacttaagccaaatagaaagtaatgttcaagacattcggtattctaatcctgtcaaggattggactgattctgagctaatgttgcagattgcttttgaagattatcatgtggatgaattagtgatttttggtgctacaggtggaagattggatcattttttgatcaatctattaatgttgctaaatcctgaaatgagattatatgcgaaaaaagtaacgttgattgaccaacaaaatctaatttgcttttttaatgcaggcacgcatgttgttcaaaaaagaaaaaattattcttatattggttttgcagctttaaaagcaatcgaagattttaatattattggtgcaagatatgagttgaagcactattctgggaactatcctcgtgttttttcatcaaatgaatttttgcctaatagtaatgaattcaggattagcttgcaaaatggtatgattgcagcaatttattctaaagatattaatcgttttcatgatttataggttaaaatagaactatagaaaagaaacaagggaattcaaatgaaatatattgactttgaaaaagatattgctggtttcgaaaacggtcgctacgaagcaagacttgaccgtgcaaaataaaatgtagaagactacatgtacaagaaccacgttcacatttttgataaaaagaagaagaaggaagtagctactatcaatggcttagctagaaatgtaacttatcaagatttggacttgccaactaaggtgggtgaaatgattactgagtatgcatacacgccaattgatgaaagaatggccgacgaaattcctgatgacgataagcatcacaatattatgaagtaaagtaaaacggtaagaagacaaaataaaatggtcttcttaccgttttttatataaatcattaaaataagtaaaaaaataagcttgcaagatcagtgatctaacaagctcttggtctattaggcacgagtaactttaccagactttaaagccttggttgaaacccatacgcgctttggcttaccgtcaacaagaatgcgaactttttgaaggtttggcttccaagcacgacgagttgagttcaatgagtgtgaacgtttgttaccgaatgtagtcttcttacctgttacgtaatcttttgccatttgctaaacctcctttatttgtgatgtcatacttaattagattatcatatgttttcgcgcaattcaatactaaaaggattttttcaggtgtattttaattattgattatgtcgttactatgataaaataataaacgtatatatagataataagacggaggacgaaacatggctgttaagatcaagacaaaagatggtttgattgatatttcaaacggtgtaatcgcaactgttgttggtggcgcagctacgtctaactatggcgttgtaggtatggcatcaaagaatgccattcgcgatggatttgacgggattcttaatcgtgccaattataagcgcggtgttgttgtcaagtcagaagataacgaaattacggttgatgtgtacattattgttggttatggtttgaagatttctgaagtaagtaagaatgttcaagatagtgttaagttcaatttgaagaatcaattaggaatagacactaaggccgttaatgtcattgtacaaagcgttaaggtacttgacgaataacacaagcggaggttttaaatagtggttttaaatgagatagatagtaagcaatttagagatatggtacgtgttgccactcatcgaattggtaaaaatgcggagtttgttaactctttgaatgttttcccagttcctgatggtgatactggtactaatatgaacttaaccattgaaagtggtgctaaggctgtttcggaaaatccaagtactagtgttagtgatttaactgaaagcttggctaaaggtatgctaatgggtgcccgtggtaacagtggggttatcacttcacaattattccgtggcttttacaaggctacccaagggatgaagaccttaactgcacaggaattagcaaatgctttttcaaatggtgttgctactgcttataaggctgtaatgaagccagttgaaggtactattcttactgtagctcgtgttgctgcacaagccggtgctactaaggccaataacaccgacgatgtaactgaagtaatgaaagctgtagttgaaggtgctaagaaggctcttaagtcaactccagatttattgcctgttttgaagcaagttggtgtagttgactcaggtggtcaaggccttttgtttatctatgaaggctttttggaaggcttaatgggtgaaaactttgcagatcaatatcaacctgacgaaaatgaaatggatgaaatgatcaatgcaatgcaccaccaatcttcagttcaaagccaattggctactcaagatattaaaaatggttactgtactgaaatcatggttgatcttgatgccgatgtgccaaataaaaagaagtttgatttggaagaatttagaaagcacttgtctggcttgggcgattcattattagctgtttctgatggtgaaattgctaaggttcacgttcatactgaacaccctggtgatgttttccaatacggtagtcagtttggtcaattaggcaagatcaagattgataacatgagaatccaacacgaaagcatcgttgaccaagatgaagaacaacaagaagcagttgattttgcagtgatcgcagttgcttcaggtaacggtattcgtaagttgtttgaaagtgaaggggtaaaccgtattatctcgggtgggcaaacgatgaacccatcaactcaagactttattgatgcaatcaagaagtctggtgcgaagaaagctattgtcttgccaaacaacggtaatattgttatggctgctaagcaggctgctgaagttagtgatattccggttggtattgtaccaactaagactatttctcagggtttaaccgcaatgctttcattcaatccagatgcatctgttgatgaaaatgtggaagctatgacagaggacttagatacggttgtttcaggtgaagttactcaagctacccgtgatactgaaatcgatgaagtagaaattcataagaatgactacttgggaattgttgatggcaagattaaggttgacaatgctgatttaattaagactactgttgatatgattgaaaagatgctggatgaagattcagaaattatcacaattatgtttggccgtgatgctagtgaagagcaagcacaagaagtagttgaacaacttgaagccaaacatgatgatcttgaatttgaaattcatgatggtggtcaacctgtatatcacttcttagtatcagttgaataacaatgattgataatgcattatttgctcctgtcacagacttaaagggtgtagggacaaagactacagctgcattaggaagcttaggcatctatagtatttatgatttgcttttttactttccttttcgttatgacgaattacaaacattaccgttagatcaaatcatggatggtcaaaaagtaatgctaaagggaatagtagccactgaagcgtttgttagtcgttttggctataagaaaacgcgcttaagtttcaagatgagaattgaccatgatgtgatcatggtcaatttttttaatcagccgtggttaaaaaataaaattgatatcggacaagaagtagctatttatggtaaatacaatgttgcccggcaaagtttaacggcctttaaattcgtagcagccaaagaaaatgatagtggtatggcgccgatttatccggttaatcgacatgttaagcaaaaaaaattagtagatctaattaatgtggctattgacgattttattgatcaagtgcaggatattgttccggaaaagttgcggcaagaatatcgtcttttaaaagaccaagtaattattgaaaaaatgcaccaccctaagaatagtcatgaggctgaactagctaagagaagtgcgatttttcgtgagttttttatttttgaattacaattagctttattgacccgtaatgatggtaaacaaatgggttatgcaaagaaatacgatctgacagaaattgctcaattaactaaatctctgccatttgaattatcagatgatcaaaagcatgtggttaatgaaatctttgctgatatgcattctgatagtcaaatgcggcgacttttgcagggtgatgttggttctggaaaaactgttgtagccgtttatgcgatttttgcagccattacagctggctatcaggcggctttgatggtgccaacagaaattctggcaactcagcatttcaaaaaaatcgatgaattgttgcgtcctttaggtgtgcgagtagctcttttaacaggcaatacaaaaacactggagcggcgtgagatctaccgtgaattaactgatggcacgattaatgtggtaattggcactcatgctttaattcaagatagtgtcatctttaaaaaattaggtctagtcattattgatgagcagcaccgctttggtgtaggtcaaaggcaagctttgattaataaaggcgatcaaccagatattttggcaatgaccgctacgccaatcccgcggacgctggctttgacagtttatggtgatatgacagtctctgaaatacatcatttaccagccggaagaaagtcaattatttccacatggaaaacaagtagtcaaatgaaggaagtctatcgacaaatgcaagagcagctaaatcaaggctttcagatttacgctgtgacaccattgattaccgagtcagagacgttagacttaaaaaatgcagaagaattgcatgaaaaattaagccatgattttcctaatcacaaggtagtcctgcttcatggtcaaatgccaggtgcgcaaaaagatgagattatgactgcatttgcagctggtgagatcgatattttagtaactaccagtgtgattgaagttggagttgatgtggctaatgccaatatgatggtgatttataatgctgatcgttttggcttaagtcaattgcaccaactgcgtggtcgaattggtcgaggacaaacacaaagttattgtgtctttctagctgatcctaagaccgattcaggtaaagcaagaatgaaaattattgcgtcgaccaatgacggcttcaaattagctgaagaagatttaaagatgcgcggtgaaggtgatttgtttggtaaggctcagtcaggattgccagaatttcgtgtgggtgatgtagtaaataactacaatacattggtcgttgcgcaaaaagaagcacgagctttggttgcggctgatcctgatttattagatccaggacataaggcacttaagcaagtgctagaatataagcaattagagcaaaacagaatttagaaaagattgtggtgaatatatgagaacaattgcaattgatgcgatgggtggcgaaaatgccccagatgcaatcgttaaggcggttttacaagctaaaactggaatgcctgagactaaatttttattatttggtgataaagaagcattaagaaaactaatccctgaagatcaaattaatgatcaattaggagttgtacctacaactgaagttattgctgatgaagatgaaccagttaaggcaatcagaaaaaagaaagactcttcaatggttgtggcagctaacttcgttaaggaaggaaaagctgatgcgttgctttccttaggcaatactggtgcattgcttgcttgtggaatttttattattggtcgaatcaaggggattgttcgtccaggtttgatgcctactttacctgttcaaaatagtgacgatggcttcaatatggttgatgttggtgctaatgctaagagtaagccagaatatcttttacaatgggccgaaatggcttcgtactatgctgagaagattcgcggcattaaaaatccgcgagtaatgctcttaaataatggagctgaaagcgacaagggtgatgatgttcaccaaaaggcctatgaattgcttaaagaaagtaatttgaatttcttaggtaatattgaaggtaatgaattgctattaggcaaggcagatgtggtagtaaccgatggctttaccggaaacgctgtacttaagaacattgaaggaacctctagcgtcttgcttcatttattaaaagatagtttattaaatggcggtgtaatgaccaagttaggtgccttaatggtgaagggctcgttaacaagcttaaaatctaaatttgatacggctaaatatggcggtgcagttttactaggcgttaatgcaccggtagttaaaacccacggtagatcaaatgaacgtccaatttatttcactcttaagcaagtagataaaatggttaaagaaaaacttgttgcagattttagagacgaattcgctgaaaaatagtacaatgttttattaaaaaggagaagttttatgtcagaagaagaaatttttaataaaattaaagacatgatcgctgataattttgatgttgataaggataagatcactgaagacactaattttatgaacgatttggatgctgattcaattgatttggttgaatttatcttgcagctagaagatgaatttggcgcagaaattcctgatgatgaagctgaaaaaattaaaacaattggtgatgctgtttcatatattaagtctcatcaaggataattttctaaaaaaagccgtctaagtgtataattttttacggtaagttgaataaataattaaaaaagcccaagtcctttgaatttggacttgagctcaaacaaaaagaccagtagtctgatgttaagaacaaaaaacacattagaagctggtcttttatgaattcaattgtaactgaaatcgcaaatattataaagtctgaagataattatattaagcgtgaaagaaaaataatctgtttcttcttaaacctgattaaggaaatcatggccttggctttagctaaagttgatgatgaaatgattaccaaggttaaagcacagggctatcagattgataagaagaatgagcgctcaatcaatatggcttttggcgaagttaggtatgtcagaagaagatatgtctgcccaggcaaacaagcaaggtatcccttggatgaattaatgggctttgacaaatacaagcgctacagtattttagcagtcaaaaacatcttagaagtaagcagcgttgccacttatcgcaatactgctctagcagtcaattgcctgtctggctttaatattagccatatgcaggtgggcaatttggtaaaaatggccgggaaaaatattaaagcgggccaagaagcagattcaagatatgatgccgcaggcactaagaaaaaggtcccagttttgtatcttgaaggcgatggcgtggtgatcaaaggcactaaaagccggttggaatttcatcgctatcaggtctgtgaaggcattgtcaatataagcaagaaacgcagaaagcgaatcaatgccaaggaatttgtttctttaagccgacttgatgcgctgaacgaagccaaggagtacctggccaatacttatgatctttctgatactgtaattcttagcaacgccgatggcggtgctggatatgccaaaacagacttcgatgacattgtagggctatgcaagcgtcatgagcatttcttggatgtctttcacctaaataagaaaatcaaagaaaggctatattttgcgcctgacctgcaaggcaagctgatttctgctttggaatacaaatacagctatgacaaagttaaaactatcctaaccactgcagaaagccgactaattgatgaattgaataccgagctcaatcatgattatctggggcgcctaaggaattatattgatcgtcattgggacgatattaagccgtttaagaaacgaaaactgactgtgactaaagccattggctgctgcgagagcaaccaccgcaagtatacctaccgtgttaaggggcaaggcaagaaatggtcaaaatctggagcagaaggcatgcttaggatcttaagctgcatcaagaatcgagagctggaattttggcttagcagcgagtttgaagattcagaaataactgtattgactgaacaggaattaaaagcagcggcccgtgacagcttaaagaagcgtcatgaagttcatttaggcatccagcatggcgcattaaccgcacaggtagctggcaatagttatttaagcaagctaagcagaaatttaagtcatataaatatttaagaaattaaggttagactaatggtttaaaggctaccgcaaaaacattgacacttacaaaagccgtgtcgtgatttgcatacgaccggctttgtgtttataattagaaaataaatagaaaagattaaatgcttttaataaaaaagctcgagatggaggaatgacctttggagaagcagagtgatcttttattagatattcaacacctgcatacggcataccgtttgcaagggaaattctatgatgcggcagacgatgttaatctgactctgaagcgcgacgagattttagccatcgttggtgaatctggttgtggtaagagtacaattgcctcaagtatcattggattgtacgaccataaaaatactaaagtaacaggggacattctttacaatgaattaaacctagttggcttgaatgaatcacttttcaataagattcgtggggacaagatcggaatgatcttccaggacccgttagccagcttgaacccattgatgcgtgttggtgaccaagttgctgaaactctttattaccacactgatatggacgaaaaggcacgtcacgcacgtgtcattgaattgtttaatcaagtaggaatgccaaagcctgaagaaatgtacgaaatgtacccacatgagttgtctggtgggcttcgtcagcgtgttgtaattgcgatggcgattgcatgtaagcctgaagttattattgccgatgaaccaacaacagctttggatgttactattcaagctcaaattttggatttgcttgaagatattcaaaaacaatctcactcagggattattttgatcactcacgacttaggtgttgtagcagaaactgctgatgaagttgcagtcatgtatgctggtcaaattgttgaaaaatctgatgtaaagacaatttttgaaaacccacttcatccatatactcgatcattacttaactcaatgcctcaatcagacgatacggatgaagatcttcatgtaattcacggtactgtgccatctttgaagaatatgccacgtactggtgatagatttgctgcaagaattccttggattcctgctagcgcacatgaagaagaacctaaggtgcatgaagttgcgccaggtcactgggtaagatgtacttgctggaagtcattccactttgaggatgaaaagacagcaagtggggagtagtttatggcaaaagaaattattcaaatcaaagatttaaaggtctattacccaattcgctctggattttggaacagaattactgattatgtacgtgccgttgatgggattaatttttcaattggtgaaggtgaaacttacggtttaatcggtgaatctggttctggtaaatctactaccggtaaggcgattgttggggttgaaaaagttacaagtggtcaaatcatgtataagggtttggacgtaactaaggcaagcaaccgtaagaagcttgattataataaagatgttcaaatgatcttccaggattcaatgtcaagtttgaacccaagaaagagaattgaagatatcattgcagagccaattagaaactttgaaaatctgactactgatcaagaacgtgatcgtgttcaagaattgttggatattgtagggatgcctagtgatgcgatctacaagtacccacatgaattctcaggtggtcagcgtcagagaatcggtgttgctcgtgccgttgctactaaccctaagttaattgttgcggatgaaccaacgtctgctttggacttgtcagttcaagcacaggttttgaacttcatgaagcacattcaacaacaatacaacattgcttacttgttcatttcacacgacttgggtgttgttaagcacatgtcagaaaacttggcaatcatgcaccgtggtcgtttggttgaattaggtagccgtgaagaaatctacaagcacccaattcacatctatactaagcgtttgctttccgctattcctcaagttgatgttgaacatcgtgaagaacacaagaaacatcgcgaacaagttgaaaaagaatttgaagaaaatcaaagtaaatggtacgacaaggatggtcgtgtatatccattacaacaagtagcacctaagcactgggtagctttgccaaaagatatggcccacgaagctaaacttgaagaattagaagaaaaggagagtgattaagcatgtggaaaacgattttacggcgtttgttaatcatgatccctcaattgattatcttgagtttgctggtcttccttttggctaaaatgatgcctggtgacccattcagtggatcaattaaccctaacaccgaccctaagcaaattgaagctctgaaacgagctgcaggtctgtttgatccatggtacgtgcaatactttagatgggtgggcaacttgttccatggtgatcttggtacaagttacatccagcacgttcctgtaacttcattgattgccgatcgtgcaaataacaccttctggttatcacttttaactactattttgacttatagtattgctatccctcttggtattacttcaggtcgtcaccaagacgaatggcaagatactagtgttagaatttttaactacatcaccttggctaccccaggattcgtattctacatcttaggtttgtggctcttcggtttcaccttgggttggttcccaatttctggttctgtttcagctagtgcctctggtttctggggcgtacttggcagtagaatctatcacatgattttgccagcaattctgtatgccttgattactactactggtactgttcagtacttaagaactgggattgttgataacaaggttgaagactacgtaagaaccgctcgtagtaagggtgtgcctgaaaatgtcgtcttcaacaagcacattttacgtaactcattattgccaatcgctgccttccttggtaacactattaccggtttgcttagtggttcaatgatcattgaaagtgtatttagttaccctggtatgggtaagttgttccttgattcaattggtcaacgtgactacactactttgactgctttgattttgatctttggtatcttgactctaattggtaacttattgtcagatatcattatgagtatcattgacccacgtattagaattcaatagggaggagagaaaaaatggctgataagaaagaaaaagctacaaagaaagctactaaagaagacgcaaagcaaaaggctactctcccaccttctggattcaaggtggctatgcacgaaattgtgcgttcaaagtctgctttaacagctttgattatcattattgtaattttactgttcacttttggtggttcattattcttaaaccgtgctcaagtaactgaaatgaacattgctgattcatattatggttggggtgaagcaggccacctgttaggtactgatgatggtggtcgtgacattctgaagctgctcatcatgggtggacgtaactcaatcatgattggtatttcagttactgcaattactgaaattgttggtttggtagttggtttggtttcaggttactttggtggagcaattgactcagttatcatgagaatagttgactttatccagattttgccacaaatgccaattattattgttttgactactgttattcctaactacaatgccgtaactttggtattcttgattgcgatgtttggttggacggtcacggcacgttacttccgttcgttcgtcctatcgcagcgtggtcgtgactatgttttggcatctaagacttcaggttcatctaactttaagattatgttccgtgaagttttgccaaacattacttcaatgattattattgatgtcgtattaagtattgctggtaacattggtatcgaaactagtttgtcattcttgaactatggtttaccaagtactacaccatcacttggtactttgattggttttgccagtgacccagttaacgttattaaccgtccatggttgtggttgcctgctaccatcttacttttggtaatttccttaagtattaactatgttggtcaagctctgcaacgtgccggtgacgcaagacagcgtgaaaactaataaagtaataattaaattaaaacagctctatcgcaaggtagctgtttttgcatatttataactaaattcttattgaaagcaaataaaatataaattaaaaataatctcataaaactattgaatttctaatttatggtggcattatttaatcatcaacttgattcaaataactattgaaaatgaattgtatcctagatgggggaaacaaagtatgaaattatcaaaagtattgggttcagtaggagtcgtttctgcggcagcattagcgttagttgcttgtggtaaaagcggtaatagtaataatgcaggtgcaactgatgctaagaaatttaagcaaacaactccagtaaaggaagttaaaaaaggtggcactttatcttatgccattgaagcagacacaccattcacaggtgtctttaataatgagttatcaaccagtcagacagacagtgatgtagctcaatttggtaacgaagcattatttgatactgatgatagttataggattaatagcaaaggtcctgcgacattcaaattggatcgtaaagccaagaccattagcattgaagttaaaaagggcgtaaagtggtcagatggtaagcaagtcactgctaaagacgttgagtatgaatacgaaatcatggctaataagggaagcaagtcagaacgttatacagcctcacttcaaaatattgttggcatgacagaatatcatgatggtaaatcaaaaactatttcaggtattgatatgccagatggcgaaaatggacgtaaagttgtcattcactttaaggaaatgaaacctgggatgcttcaatcaggtaacggatacttcctcgaaaccgcaagtccatatcatcaattaaagagtattccatttaataagcttgaatcatcagatgctgttcgtaagaatcctttgttctttgggccatacaagattagtaaaattgttcgtggtcaatcagtaacttgggttcctaataaatactactggagaggtactccaaaattagataaaattacggtatctgtagttaaccctaactctgcttctcaagctattaagagtcacaaatttgatattgctagagttgttaattcacaatggcaacaggttaagaacactaaaggtgttaactttgttgctaaagtaccacttcaatacagctacatgggcttcaaggttggtaagtgggaaaatggtaagaatgtcatgaacccaaaggcaaagatgaacaataagtcacttcgtcaagcaatggcctatgcaatgaacattgatgctgtggaaaagcgttatactcaaggcttaacattcagagtacctactttaattcctgaacaatttggaaattactttgacaaaaatattaagggatacaattataaccttaaaaaggctaataagttacttgatgacgctggctacaagaagaaaggtaagtatcgtgttcaaccaaatggtaagcctttgaccattcaccttgcagctatgtctggtagttctactgctgaaccaattactcagaactacattcaacaatggaagaagatcggcttgaatgttaagttaacaactggtcgtctaattgaattcaattcattctgtgataaagttcaacatgactctaaagacgttgatgtattcatggctggttggtcactatctagcgaaccttctcctaacgatctttacaatgaaaaggcaccatttaactacactcgtttcgtaactaagaagaatactcagcttcttaaggacattgactcacaaaaggcatttaataataaatacagagtacaaaaattccacgaatggcagaagtatatgtttgatgaagcatatgttgtgccaacagttaatgcataccaaattgacgctgtgaatagtaagcttactggctactcacttaagccttcagatgctaactcagtttggtacaatgttggttacgctaagtaattcattaatcattagtaaaactaaactccaaaattctaaacataaacaaattccttatattaaattctaataactaactaatagaaaagacaggtatcttaatccaaatacctgtctttttcatgctattgttatgtttttgtaatagtgataaaattaaaggatcaacttgctccaagtaatggaggaattttactaatgaaaaaggcaaaactttttgctggtattacactgttatcaggtgtagctcttaccttagctgcctgtggtaagtcagaatctcattctgatgaatcaaagactgcttctaagtttaaggaagctgttcctactaaggctactaagaatggcggtactgttaaggttgctgttgaagctgataccccatttactggtatcttcaacgacgaactttcaacttcagctactgatactgaagttatgcaatatggtgcagaatcactttttggtactgatgatcactatgttttcaatgataaaggtgctgcaacaattaaggttgaccaaaaagctaagaccgtaactgttgaaattaagaagggtgttaagtggtcagatggtaagcaagttactgccaaggactatgaatacgcttatgaaattattgctaacaaagacactaagtcacaacgttacacttcaagtttagctgatttggaaggcttacaagaataccatgaaggtaagtcaaagactatctcaggctttgaaatgccagatggtgaaaacggccgtaaagcagttcttcactttaagacgatgaaacctggtatgaacacttcaggtaatggttacatttgggaagctgctgctccttaccactacttgaaagatgttaaattcaaggacttaatgtcaagtgataagatccgtaagaagccattgttctttggtgcttacaagttgcaaaaggttgttcgtggtcaatcagtaacttgggttcctaacgaatactactacaagggtaagccaaagctttcaaagattactgctacagtaattaaccctaactcagttgctcaaagtattaagtccagaaaatttgacgttactcaagtaatcaactcacaatggaagaacatcaaggatactaagggcgttaactttatcgctaaaattccactacaatactcatacttaggctttaaggttggtaagtgggatgccaagaagggcgaaaacgtaatggacaagaattctaagatgaataacaaggccttacgtcaagctattggttatggtatgaatgttaaccaagtttacaagcgctactcattcggtttatcattcagaattccaactttaattcctaagcaattcggtgattacttcgacaagaacatcaagggttacacttacaatatcaagaagggtaacgaaatcttggacaaggctggctacaagaagaagggtacttaccgtgtacaacctaatggcaagcctttaactattcgtttagctgctatgactggtagttcaacagcagaaccaatcgttcaaaactacatccaacaatggaagaagatgggcttgaacgttaagttaactagtggtcgtttaatcgaattcaattcattctacgacaaggttcaaaacgatgatccatcagtagatatgtttattggtgcatggtcattatcaagtgaaccatcacctaatgacttgtatagcgaaaaggctccaatgaactactcacgtttcgtaactcctgaaaacaccaagttacttgacgaaatggattcacagaaggccttcaaccacaagtacagagttgaaaaattccaagaatggcaaaagtacatgtttgatgaagcttacgtaattcctatagctaatagttactcaattactgccgttaacaagaagcttactggttactcacttaagccatcggattcaatgggtaatggtttccctaactggtacaatgttgcttacgctaagtaaagcaattatttaaaattacaaaagactgtttctaaattttagaagcagtcttttttctgtgacccgaaaactggtataatttataggtataaaaaggggcatttttatggtaagtacaaagtttttaaaaaaattaaaagacgattataatatcgaatttaacaatgaaaagctattagaagaagcatttacgcattcttcatattcaaatgaacatcccaatgatggaattcgcgattatgaaaaactcgaatttcttggtgatgctgtgctagaattagccgtttcgaattatgtttatcttcattatcctaagttgaatgaaggtgaattaactcgtttgagatctaatattgtccgaactgaaggattttcagaattcgccattgaatgtggttttcaagatgagattcacttgggcaatggtgaagaaaaagctggagcacgacaccgcaaaactttactggaagacgtgtttgaagctttcaatggggcacttttccttgatcaagggatgccagcagttgaacattttttgcatttaacagtttatccattgattgataagggtgaattcgatgattcacgcgactataagacagacttgcaggaagtattgcagcaagatggtcctgtgaatatcgaatacaccgttattagtgaatctcaattaccttcacactttgttgttgaactaaaaattaacggaaaagttgaatcaaaaggtgagggtcacaataagaaagcagctgaacaacaagctgctaaggtcgctttacaaaaattagaaaaataaggggatgaaaaagtgccattaacagaattagtgctcgatggttttaaatcattcgctgataagacaactattcattttgatgatggaattactggaatcgttggtcctaatggttcggggaaaagtaacattactgaagccgtacgttgggtaatgggtgaatccagtgctaagtcactacgtggaacgaatatgaaggatgtcatctttgccggtagtcaatttcgcaagccgctcaataaggcggaagttactttagtttttgataataaagagcgtgagttggcttttgattcagatcaggtctcaattactagaagatttctgcgatcaggtgacagtgaatttttaattaataatcagcaagtgcggatgcgagatgtgcggacactctttcttgattctggaatttcacctaatagcctagcaattatttctcagggtcgagttgatcagatcttaaattctcgtcctgaacaaagaagagtaatctttgaagaagctgctggtgttttgcattttaaacaacaaaaagaagctgccaaggcgcaaatggagaaaaccaaggataatttaattagaatcaatgacttggttaaagaacttgaaggtcgattggagccgctgcatgagcaaagttcgctggctaaagaatatcaatttcaaaagaagggactagatcagaaattaaaaagtctattagcttttgaaattgaggatttaaaccggcaaaaagaagaagtccaaaaagcagcagataggaaccaaatcctgttaacaaaactggataatgaagtaaaaggttcgcaaagtgctgtttctgaaaaacgggcagaatatcaaaaaattcaaaatgagcgagagcaaacgcagagtgaattattaaagctaagtgaccaattatcacagatcaatactaacttgcaggtcgcacagcaatcacaacagtttaataattcaactagggtagaaactcaacgtcaagttgaagaattgaaaaatagcttggttaagctaaaggatgaattgtctgaactgcagcggaataaaaagcaacttaagcaggagcaagatgctttacaagagcagcatgatcaattgactggtaaattgcacgatgatccagaagaattgagtaagcgactagaagattgtcgtaacgactatattcaacttttacaagatcaggctacaactaataatcagattgttaatctgaatactgaattaaaacgtagtcaggcagacactacttatcaaaatagtgatgtaagcaagcagctaaccgatgctcggactgaactggaaaagctgagaactgaaggcaagcagctgacagttaagcggcaaaaggaaaaagaaaaatttgcgcaagttaatgatcaaaataatgatttaactaaacagattaatcagattcggcaagccgttaacgcagagcgcagtaaattagagaaagttgaagcgcgacatgaagctttagtaaatattcaaaagcggcatgagggttattactacggtgtacgtaatgttttgaatcatctatctgatttccctggtgtgatcggggctgtgggtgaattgattacatttccagttgagctagaagctgcaatgacgacagctcttggcggtggcgtacaggatttgattactgaaagcagagttagtgctagggatgcaattaatcaattaaagcgtagtcgtagtggacgagctacttttttaccattagatggcttgcgtcaatatactattccacagtcaactatcactactttgcaatcttttagtggctttaagggcgtagcaagtgatttagttgaaagtaaagccgatcaagatattactgctgcgattaattatttgctgggtagtgtgattatcgttgatacgattgatagtgcaatgtcaatttcacgtcgagttaaccgctatcggattgttaccttagatggcgatgtgatttccccaggtggttcgatgactggtggtcaaagaaaccaacgtaataattcaccactgcagacggcaactgaaattaatcagttagagaagcaattacagactttacgacaaaatttggctgaagatcaagaacggttagatgagctagttactcaaggtgaaaaagttgcggctaaattgcaacaactgcgtgatactttgcaggagactaatcaagcgattaatgaagctgctatttctttccaaaatcaagaaaaggaagtaaagcggctaactgatgctaatagtttatataaatctcgagtaaaagaacaacaagatcggattgctgctttaaagaaagaaatcactcaggctaatgatcagcaggaacaattggctaagcaaaatgaagtacaaaagggcaaaatgaatgacttgcaagaaaagattaagaacttcaatagcttaagtcaacgtgtacaagaggaattatcaaagcttgatcctcaaattgcagtttatactaataagttggaaaacttagctagtcaggaaaaagaaaaaaatattcagatcactaataatcagaagcaaactgatagcttagagcagaaattaactgaattaagtcaaaatggtgaattatcagttaaaaagaattctgatttacaaacacaaaaagctgaaattaagcaaaagaatgaaactctgcaaaagaagctgaatgaacttagtgcgcaattaggacaagttgatgcgcagattaatcaacttgaccaagttgccagtcgtaattatgatttacgcaaagatgcagcaattgaacaagaagattactcagtaaagattgcgaagtttaattccgcaattgatcagcgcttgtcaactttgagtgaagagtatgccttaacgtttgaagctgctttagagcaagcagaaggcgaaaatactgaagaaaagcgcaatgaactggctaaaagcgtgaagttgcatcacatgtcaattgaagatattggccaagtaaatcttgattctattcaagaatatgaagatgtgaaaaagcgctatgactttttgaatggtcagcaaaatgacctgttaaaagctcgtgatgaccttgaaaagtcaatgaacgagttagatgaagaagttaagacgcgcttcaagagtacctttaatcaagtagcatctagctttaagagtatttttccagttgtctttggtggcggtaaagctagattggaactcactgagcctaataatttgctagaaactggaattgagattatcgcacagccgcctggcaaaaagcagcaacgtttaagtctgctttctggtggtgaacgcgcgttaaccgcaattactttgttgtttgccatgttgcaggttaatccggtaccattttgtgtacttgatgaagtagaagctgccctggatgatgcaaacgttactcgttttgcgcaatttttgcttaaatacgatatgaaaacccaattcatcgtgatcacgcatagacgagggacgatgcggcaggctgaccaactatatggtgtggttatgcaagaatctggcgtttcgcaagtattgtcggtttcattaaaagaaatgaagaataaaaatgaggtgaaatagttgggtttatttgatcgaataaaaaaatcactctttggtaaaaaagacgaagaggatgaaaacaaaaaagaagaaaaacagactgagcaagaaaatgaagctaagactgaatcagaagataatgatcaagaatctgaaaaagtagttgatgaagctaaatcgaaaactgaaactactgatgaagaagaacaaacagtagaagcacaagaagactctgaggtagaagctgaatctggtgatgaagaaaaagcagtagatttagattctaaacaacagcctgaagaagttaaagtagaagagactactgagactgaaacagaagaacaagttgaagaaactgaagtttctgatgaggagccaacagaatcacaagaacagctttatgaaaaggggctagaaaagactaacaagggatttggtgcaagacttaacgccttttttgccaagtttagaacagttgatgaagatttcttcgatgatctagaagacttattaattgaatctgacgttggctatgaaactgctgaacaattaactaatgaattgcgtgaagaggctaaattgcaaaatgctaagtcacgtgatgacttgaagcgagtaatcgttgaaaagttggttgacctttacgataaaggtggcaatagcgaagatgagcaattgacgtataatgctgaagctaaacctaacgtttacctacttgttggtgttaatggtgcaggtaaaactactacaatcggtaagttagccaaacgttttaaggatgaaggaaagtcagtaattttagctgcggccgatacctttagagcgggtgccgttgaacagctagttgaatggggaaaacgtgttgacgtacccgtagttactggtaaagaaaaggctgatcctgcttctgttgtttatgatgcaactgaacgggcaatcagggaaaaagctgactatcttttagtcgatactgcgggacgcttacaaaataagaagaatttaatggctgaattggaaaaaattcaaagaacaatcaagaagcttttaccagatcagccaacagaaaccttgcttgtgttagatggttcaaccgggcaaaatgcgcttttgcaagccaaagactttgacaagaccaccgaattaactgggcttgttttaactaagttggacggctcatctaagggtggtgtagttctagctatccgtaacgaaatgaatttgccggttaaattggttggcttaggcgaaagagctgaagacttagctgattttgatgctgcaaattatgcgatcggtcttttccacggcttggtctagtgataaagttagagatgtaaatattgttttataaggagaattttatgaaagaatatagtgcttgtactactatcttagttggtaaaaatgcctcgattgatggcaccactatgattgctcgtaatgatgacacttttcgtccaattaccccacaaaagttcattattgagccagcccgtcatggtgaaaagaaacatattaagtcatggttaaacaagtttgaaatggacttgccagaagatgcgcaacgtgtaccagctgttcctaatgttgactacaagcatcgtggctactacgatgaaagtggaattaaccaagaaaacgttgcaatgtcatgtactgaatcaacttatggtaatgagagaactttagcatttgatccacttgttaaagatggattagatgaagactgcatgcagacttctgttttgccatacattcattcagctcgtgatggtgtacaatatttaggtaagttaattgctaagtacggttcaccagctggtaactcagttttattcagtgataaagatgaaatttggtacatggaaattgttacaggtcaccactgggtagccgagcgcattccagatgattgttacgctgcaactggtaatcgagttgcgattgaacaagttgactttgataatcctgattacttcatgtggagtaaaggtattcaagaatttgttgaagaacaccatttgaacccagatcatgaaggctggaacttccgtcatatttttggtacctatactgaacaagatcgtcactacaacaccaaccgtcaatggtatattcaaaaattgttcaatcccgaaattgaacaaaacccacaagatggcgatattccatttattcgtaaggcagctaagaagatcactaaggaagatattcaatttgctttaggttcacactaccaagataccccgtatgatccatttggtaagggtacggatgaagaaaaacatcgctaccgtccaatcggtttgaaccgtacgcaaaatgctcatattttgcaaattagaagtgatgttccagcagatcgtgcggctattatgtggttatgtatcggtggtccaactttcactccatttgtaccattctttgctaatatgaatgatactgatccttcatataacaatacctcaatggattacaatatgaatgatgcatggtggtattacaagtcatttgcagctatcgttgaaagtcattacccacaatttgttcagcttgatactacttatttaactgaacttaaccgctacttcagaggtcgagttgaagaaattattgctggtgcagaaggtaaatcaggtgatgaattaactgaatatttgactaaggaaaatcaaaagactgttgcccatactcgtaaggaaactgaaaagctttggggtcaaatgatgattgaatcgatcaacatgtccaaacttactttcaatatggatgaaaatctttaataaattcaaaacagctcgaaaaagggctgttttttataatatgtgaaatgaaaggaatatagacaatggcagaaggtactattggctcattttttactaagattaacaatgaagttgaaaaacaaatgaataacgatttaaaaaatttggtattaatgctaatgaattggaaatgcttattgaattaaatcatcatcagcatggcaaaacttttgaaaagttggctaaagaattgcatgtaactaatgacaaggtcaaatctttgacaaaaaaattggctgccaaagatttgtgcaagaaatttgaaaagcaccgtgcagaaactgaccaaactattacagggatgctcagtaaagatgaaactcttggcttggttaatgtactgaaaaagatgcttaagtcgagtgaagacaataagtaatgtaaaatagtagaactccagaagttaattacttttggagtttttttatgcaaaaattattgacaaatctttaatataatattactgtattaagtaaatagaacagtaatattattagtgaaaggataaaaatgtcagaaattttaagagtggatcaagtaactaagacttatggtaaaaaaggtgagaagcaataccaagctttaaaaggaattagctttgccattgaacaaggtgaattcgttggcattatgggtgcttctggttcaggaaagacaactttattgaatatcttgtcgacgttagataagccaactagtggacatgttttagtcaataagcaagacattactgcacttaagaacaatcaaatggcagattttcgcggaaaagaaattggctttatttttcaagatttcaacttgctagataatttgactaatcgcgagaatatagccttgccattatcgcttcaaggagtgaaggcaaaggatattgacggaaaagcaatggcgattgccaaaagattgggaatagaatctatcttggacaaatacccagctgaaatttctggtggtcaaaaacagcgtgttgcttcagctcgagcattggtccataatccggcaattttatatggtgatgaacctacaggagctttagattcacaatcagctacggaattattgaaaacaatggcagacttgaataagaatgatcaagtttcgattctgatggtaacgcatgatccttattcagcttcttacgctcaaagaattttgttcatcaaagatggaaaaatcggcaaagaaattaaaaaagaaaataagaccagagaagaattttatcaagatattattgctgaattaggtagacgttagagggaggtatagacgtgctttggaaattatcactaacagggctaaaaagtcgctttaaagattatgctgttttgttttcggggctaactctagctgctgcaatcttttatatgtttatgaccattgcaattaatccagcttttcttaagggttcaatggccattgccttttcaattacccagatggtctttatttttgggatagcgctattagctattattaccctagtctatattgtttacgcaaatagttttttgcttagtatgcgtaaaaaagattatggtacttatatgatcctaggagcgagaaatagtaaaattggccgtttaatttttacagagacggttgttattggtttactcgctactgcattaggaattttaattggtatcggcttgactcaagttgtttctcagttattaatctctcaactgggtttgcagctgcataaattcttaggcttttatttaccggctattttatggacagttgttttctttgtagttttatttttcttggctgcaatttggaatcggcacaaattggtaagtactagtgtaatcaagcttttgcatgaggatcaaaaaccagttaagttacgtaataaccgaatctggaaagcaactgaagtaattctaggccttgcccttctagccattggctactgggcaatgtgggattaccatcagttgcaaattaaatcggttgaaattggttttgtcactattttggctggttcatattttgtatttgattctgtatttactacagttatcaatgctttacggaaaaataaaaagtttaaatacagtaaactgcattcttttaccttaggtcagctaaaatttaggttaggtgattacaatagagttttaactgttatttccttgctttttgctctagcattaggtgcgatcactgttggattaaactttaataatatgacagagactgctcttcaggcaacatattatgatgctgtgttgtataaaagggatgctaaagttaatcaacaacttaaaaaagttgccgttagaaaacaaacgactttgaattataaggtcaatgggaaaaagaagtttcctgttctatatgttactgaccaagaaattgctaagaaaaaaatcaaattccaatctggtcgaaagaacggcgaccaaatgaattggaagacaaagacgattacagttgcaggtgtaaagaataaaaaacaagagatgaatttccaacttgctagtttaacaccttattctgattatgaggttaaagttgtaactccagctgaatatgtgaagattcctggaaaaaacaaacaagtaaccttgctattaatcaataactttagaagtaattttaataatattgaaaaattgcaaaagatgtcacttgaccagacagttactaaggatgcacaaggagtttatgtttctctgaataattctaaatctgctcaatatcgcttagtagcaagcgttgcgtcaggttttgaatttatgggcttcttcttaggcttagctttcttagctatgttagcttcaaccttaatgtttaaagtgctatcaggagcaaacagtgatcgtcctcgatatgaaatgttgtggaaggtcggatcaagacgtaagttattaaagagctcgattaaagcggagattggtaccttgttcgctttaccggctgtcttgggtgtgattgatgtattatttggactacaatttttcaaagggattttagctaatccatacgataaaatttggattccatttacgatctttttagtattgtatttgctttattacttaattacagtaaaactctatgaaggaattgtattgaaaaaataatggtacgaaaaaagatctgcaaaatgcagatctttttaactgtatttagattaattttatttattttgcttatttaaaattgaatgacgaacaccatagctaaagtaaatgattaagcctaaaataaaccaaataccagcataaaatttagcttggtagtcaagccctaagaagacaattaaagcagccatgaaacctaaagcaggtaaaactggataaaatggcatcttgaatgaaggatcatcaatgtcttttccttcacgtggacgcaacttataaatacctaaagaaacaaacataaaagcaattaaagtaccagctgaaaccaattgtgacaacatggagaaggggaaaaatgctccaagtaaaattgctacgattgttaatgtccataaagcattattaggtcgacgatctgcattcaacttgcccagccatttaggaagcatctcgtcacggccaaatgaatagatcaatcttgaaccggccatactcatcccaatcaaagcagtgaacatccctaaaacagcaatggtttggacaatgatggcaacaattggatgaccagcaaaccgtaaggctaaacccactggttcagcggaattagcatacttctgataaggcataattccaattaaaactaaactaactccgacaaataaagtaacagcaatagcaagtgagcctaaaatgctgcgaggcatagttttttgtggattaattgcctcagctgagttagcggcgattgaatcaaagccaatgtaagataagaaaatcattgaaacaccagcatagattccttgccagccaccgaatggaccgttagcagtcatcttgtatttcggtataaatggggtgaagttaacttttttaattgcaaaaacgccaacggcaataaagagtagaatggctaacacctttaatacaactaaggcattttcaacgcgagctgcccttgaaacaccatgaccaattaataaggcaactaacaagattgaaactaaagaaatgatatcaataataccaccgttattgccaaaggcgttagataatgacgcgggtagtttccaacctaatggtgcgattagagctctaaagttagcagaaagccccgaaccgacgaaagccaaagcaatgaaatattctgctagaagggcccatcctgctacccaaccccagaattctcctaaaactacgttgatccatgaataagctgatcctgcaaatggcattgcagcagccatttctgcataggcaaaagccactaaaccagcagcgattgctgctaaaataaaggaaatcgctactgcagggccggtatgcttagctgcaacttcaccaggtagagtgaaaattgaagcggagacgattgttccaacacctagagctaagaagtcctttacttttaatgagcgcaccaggtgtccatctttattttcatagacgcgtggatcttctttactgttcattctctgccaaagattcacaacgcaacttcctccttatgttaaaatatattcatctaattataattaaaagtacgttaaaaaatcaactattacatatttgaaattccactttttttagaaattgttatctaagataggttaatctagcactagcttatgacctttgttatactaaagactggtgaaaatcaatggatgaactaactaaaaacgaggagctaggcgatttatatgcctactatggctctttattaacccaggggcaacaatcttattttgaagactattactacaatgatttgtctctaggcgaaatagctgctaatcatcaagtatctcgtcaggctgtctatgataatctcaagcgctcaagtaaaattcttcagaactatgaagagaaattgcatatgaagcgcgacaacaatcaggttgaagatgtcttggcagatacgcttttatctttagataatggtgatagtgaagctgctaaaaaagaaataaccaatttattaaatcaattgaggggagaatagcccatggcttttgaaaatttaagtgaaagaattcaaaaagcattaaaaaatttaactggcaaaggtaaggtctcagaagaagatattaataaggctagtcgtgaaattcgacttgctttgttagaagccgacgttaattttaaggtcgttaaggactttattaaaaccattaagaaagaagcccttggcaaggaagttcaggaaagtttaaacccaggtcaacaagtaattaagatcgttaatgaacagttaacgaagatgatgggtgaagaagcagttcctttaaacaagtctaagcatattccaactatcattatgatggttggtttgcagggaactggtaagactacgactgtgggtaaattagcctatcatttgcaaaagaccgaaaaggcccgtccgctgttgatagctggcgatatttatcgtccggctgctgttgatcaattgaaacaaattggtgatcagttaaaagttccagtatatagtgaagacggagaaaaagacgtagctaaaattgttcaagatggacttgcagaggctgaaaagaacaagaatgactatgttttgatcgatacagctggtcgtttagaaatcgatgaacctttaatggaagaattagagcgggtaaagaaagtaacccatcctgataacattcttttagtcgttgatgccatgactggtcaggcggcaacagatgtagccaaaggctttgacgaacgccttgatgttacgggcgtgattttgactaagttagatggtgatactcgtggtggtgcagctctttcaattcgtgcggtaactggtaagccgatcttatttactggtcaaggtgaaaaattaagcgatttagatgttttccatccagatagaatggcatccagaattttaggtatgggtgacatgctttccttaattgaaaaagcccaacaagattatgatgctaaggaagctgaaaaagtcgctgaaaagatgcgggaaaatacttttgacttcaatgattttgttgatcaattgcaacaagttcaaaaaatggggcctcttgaccaaatcatgaagatgattccgggactatctaataatccgcaattaaagaatctaaatgttgatcaaaagcaaattgatcatactgaagcaattgtttattcaatgactcctgaggaacgagaaaatcctgatatgcttaatccaagccgtcgccgaagaatagctgctggttcaggtcgtcctgtagttgaagtcaataggatgattaagcagtttaagcaaatgcgcgacatgatgagtaaaatgtctaaaggaaatatgaagggcttgagcaatttgcctggaatggattcgccaatggctaagatggcaatgcgccgaatgaacaagaatttcaagaaaaataagaagaagcgtttacgcaaggtaaaaagattccattcttaaaaaataaactgttaaggaaaaatactttacacctgttaagtttggtggtatattattaatcgttaagttttaggaggaaattaatttatgtcagttaaaattcgtatgcaccgtgctggtgccaagagaaagccattttacagaatcgttgttgcagactcacgtatgccacgtgatggtcgcttcatcgaacaagttggttactacaacccagtttcacaaccaaaggaattgaagcttgacgaagacaagatctttgaatggttacaaaaaggtgcacaaccttcagacactgttagatcacttctttcaggtgctggcttgatggctaagttgcacgatgcaaaatacaataagtaattttgctattaattaagagcttgatgccgtgtgcttcaagctttttttatacctaaaggagaaaaaatggaatattacgatgttgctcggattttaactacgcacggtttgaatggtgaagttaaagttagtataattactgatttccctgaagatcgttttgctatagggatgcatttggcaatcaaaggtgaaacttctcaagttttaactgtggccaagagtagaccttttaagcaattttggttagttcaatttgcagagattactgatattgatcaagctgaaaaattaaaaggaaaaatactagttgttagtgaagccgaccgcggtgaactacctgaaggcgtttattattataaggacatctttgactgtgatgtcattgatgaagaatccggtaagcgcttgggtaaaatcactgatattgaatcgcctggtgctaatgatatttggctagtccatgaagataatggtaaagagtattggattcctaatattgcatcggtggttaaaaaagtagatgtagctaataaaaaagtctatgttgagttattggagggcttacgcgatgaagattaatgtattgacactttttcctgatatgtttgctcctttgcaagtttcaatgttgggacgtgggcttgaagataaaaaatgggagcttaatttagttaattttcgtaatttcactaccgatgtacatcatcatgttgatgatacgccctatggtggtggcgctgggatggttttgcaaattatgccgattaaaaaagcacttgactcgttaccatccacaggtaaggtaattattactgcaccacaaggtaaaacttttaatgaaaaaatagcgcaaagctgggccaaagaagatgaattaacctttatttgcggacattacgagggctttgatcagcgggtttatgacttggctgacgaaactgtttcaatcggtgattatgttttaactggtggtgaattgccaacaatgagtatgattgatgctacagtaagacttttacctggtattttgggcaatgcagctagtccagttgaagaaagcttttcacatgggttgttagaatatccgcaatatacgcgtccagcagattttgaagggcaaaaggtgccagagatattgactagtggcaatcatcaaaaaattgcacaatggcggcataaagaggctcttagaacaacatatttgcatcgacctgatttgctcaaagaacgagttttaacaactgaagaaaagaaaatgttggcagatattaaagcagagcttgattaagcaagctctacttgatatactattcatcgtggcgtgaccacaatgaataagtttaggggtgttccgctggcgttggtacgttgatgaatgccgaagaaggagaaaagtatattatggatccattaattcaagaattaactaaagaacaacttcgtgacgatatccctgcattccgtgcaggtgacactgttactgttcatgtacgtgttgttgaaggtactcacgaacgtattcagttgttcgaaggcgttgtaatcaagaagaagggtactggcatcggtgctacttacacagttcgtaagattgcttcaggtgttggtgttgaaagaaccttcccagttaacgacccacgtgttgctaaggttgaagttaagcgtcatggtcgtgtacgtcgtgctaagctttactacttacgtgaacgtcacggcaagtcagcaagaattgctgaagcacgtcgttaatcataacgtcaatcataaaaaaggtcagttccagtggaactggctttttttctacccaaaagttgtatataaaatgctatgatggagttatggaatgaatgaggtgaaataaatgaagttcaattgcaaatttgcacttgtggcagcaaccgtattgacagtagcacctatattatcttttcccaatatcacgactacggtacaagcaacgacgaagaaagcccaagcagctaagaatacaatccaggtaaataaagcaccaataatttatgatcgtgcaggtaattataattcgaaatatcatcaaaatatcaaagctggtactcatttaaaatatagtggcaagacttatattattcagcagcgctttgcagctgggattcctgtgccaactagtcgaattattggttgtaagctttactattcgattggtaaaggaggctatgttaaagaaagcgatgtgttaacctggcttggtaacacaaatacggtcaagttacattttcggcacaagaaaaattatatttatgataaaaatggtaaaaaattagttagctataatggtggcaagaattattttactaataaacaaaaaccaaaaattgaggtaccatactataattcgcctaagcaattatttaatattggtaagggcggttatattgatgccagccaagtaactactttgaatggcaagggaaccgtgtttttaaataataatgcacctatttatgatgcaacaggcaagcaattcaagaataaaaatctaaagcaaggcacggttttaaactattatggtaaacctaagaaagcggctgctaatactcaattttattattatcaaaataaaactaagatgactttacctgcaattcaacaaggtgatcatacttattttcagattagtaaaacacaatatatcaatgcggcagacgttgctttagtagatggtaagacgttgtgggataaaggacctgtgagtgtttctttaataaatgatgcatatgcgtatactgccaaatttaagcaaaataaaaaggtgctttatcgtgctggcgctaaactaacggttgatagaaccaaaatagaaggtgaaaaatcacctcaactttatttacatgttaaaggtaccaaaaactatctttatttgggtaatgaaaaagactatggcgcatcaccattagattatcgtcacggttcaactaatttaatattgcagacactgttgcataattagtctgtgtgtaatacttttaaactgatatcataaaggactattatcttaatagaaggtgatagccttttattttaaaaagatcacaatgataaaatggctgtatagtagtaatgatgaaaaaagattgtgaagaaattcaaccgtgaaacggttgtgaaactaagacaaaaatcacaaagctggcagatatctattactaatcttgatataaaggcatttgttattgtgaagctatttttgtaaaaaataatattaaatgtggaattagcgttagaaataatagttatccacatttgtaaatgtccccagtaaagtcgagtaaaacaaaaatttaaaagaagatggaaaaatggattatccgaaaaaactgattgacgaagtgaaagaacgatctaaaggcatgcagctagaaggaattaattctggctcgggtccccaacatcctttattaatgattgtcggtgaagctcctggtcgaaatgaaattgttaataatattccctttagcggggatgcgggtaaggaattggataaatcattgaagcagattggtctgacacgtgatcaggtatatattacatctgctgtgagaagtcgaccttttgcaatcaaaaaggtttttagcaagcgtgaaaataaagaagtaatcaaatatcccaatcgtaagccaaccaaaaaagagattctagctcatgcgcatttcttagattttgaaattgactatgctcaaccaaaactaattgttgccttgggtaatacgggattagaacgtcttttggggtctggtcataagatttcagctgaacatggtcaagtaattaaaaatacaccaattttacgtttaaatgaaactaaagacggctatatttggtcaaaagaaagatacactattttcccagaatatcatcctgccgctgttttttataatcgcaagctaacagatgatattattaaagattgggataaaatcaagccgtatgtagaaaaggaaaaatctgaaaatgagtaatgaaacttttttgattccaattagacaaaataatgatttatcggatatcgctttaaatgaattacgcatggatctagatgagcatgctttacatcaacgttattacactgatattgcttatttagcaggaaatagtcgtaagtatagtctaaatagtgtacaaaccgttgcgagtcctttgataggtaagaaaattttatttttgggttcttctgttacttttggttttggcgctttgggtgaaagctttgttgattatctttggaagcgtgatggcgttgctgcaattaaagatgcagaaaatggtacgaccttagttgatgaagatacttataagccaaacgattcttatgttgctcgttttagagaagagctgaccgaatcacaacctgatgtttttgtcttacaactttcaactaatgatgcaaatcaaaataaaaaactaggcaaaattactaatcaaaactttgacaccaaaaccattacgggagctttggaatatatgatttcaacggctcaagcaaggtggaaatgtccaattttaatttatactaatccttattttgctaatccgttatacaaacagatggttgaacgagtacacgaactggctcaaaagtgtcacgttgagattctagatttatacgatcatcctgattttcagcatcaagacgctttgtatatggctgatgaaattcatccaactcgtgcgggttatctaaagaaatggttaccattatttgaagaaaaaataactgaaattttggcataaagaaagacctagataaattatctaggtcaaaattgaaattagtcaatgttattacgatacaagctaactaccttacccaaaattgtaactttaggtaaaatgattggagccattgtatcattttctggctgtaatcggtagtgatccttttctttgtagaaacgcttaactgtagcttcattttcttcagtcattgccaccacgatttcaccattgttggcagatgattgtttgcgtacgattacgctatcaccgtttaaaatgccagcgttaatcatactttcaccgtggactttgagcataaagagttcaccagcatcactttttaagtctggtgggagtggaaagtagtcatcaatatcttcaactgccagaattggttgtcctgcagtaaccacaccgataactggaatttcctttggcttgatacctaactcttttttaccttcacgggtaatttccaaagcacgaggttttgtagcgtcttttactagccagccctttctttcaaggcgagctaaatgaccatggacagtggaagtagaagaaagaccaactgcagaacagatttctctaactgtaggtggaatgctccgtttctcaactgtatcgtaaatatattgcaaaatttctagttgctttttatcgcttgtttttcttggcatttttaattctccgtttgtatttatggtacttaatattataacctaattctaccagataatgtcaatattatcaaacaggcgttcttaagaagttatactttttttatgacataaaatagggtagactaatgagtgttaatgtgaggtggaattattatggataataaagatgcaatgagcaaagaagaagaaaaaaaggtaactgatcgaatcaacgaactttaccataagaaagaaaaggaaggcttaactccagaggaagaagctgaaagaaaagaactacataagaaatttttagctaactttagagctgcctttaagcaagatgttgaaaacatggtcatcttagacaagaatggcaaggaagttacctcagaacgtgccaagcgagcacaaagaagaaaaggacttagaaaagattaattagttctttcaaaaagttagagaactatgataagatataaatgttagttagatggaggatttaatatgaatttaggtttagcaatttttttaattatcattgcgctcttgattggcgctgtagcaggtttttacggtgcaagagcttacatgaagaagtactttaaggaaaatcctcctattagtgaagatatgatcgttgctatgatgtcccaaatgggtcaaaagccttcaaataagaaggtacatcaagtaatgaacatgatgaagcaccaacaaaagtaattaatttaattagttttgttagaaaaggcgaaggatttccttcgtcttttttgtgcacttttaagaatgaggtgaaatatgggaatatttagtaagttagggtggttttttaaggctgagaaaaaacgttatatcataggcattacctttttggcgttaacttctttagctaacttggtaccgccccgtgtattaggcttaatggccgatcaattggatcaaggtcacatctcttggggacaatatggaatgttgatcattgctgtcgtggccgctgcattcacactttatattttgcgctatttttggcgtaaacaaatttggggcggcgcagcagaattagagcgccaaatgcgttcaaagttatttgatcattttatggtgatggatcggactttttatcagcgtcatcgaaccggagatttaatggctcatgctactaatgacgtttctgccattcagaacgttgctggtgatggcgttttaacattggttgattctttagttatgggactttcaacaatgattgccatgatcatttttgttgattggcgtttaactattgtagctttattaccattaccgtttttggcattgggagcttggaaattaggtgatcacttacatgatgcttttgataagtcacaggctgcattctctaagctgaataataaaactcaggaatctgtatctgggattaaggtgctcaaaacttttggtcaagggaaagaagatactgctgcttttgacaagatggtcgatgaaacgatcaatattaataaaaaagtttttgtctgggattccttatttgatccactgggaacaataattatcggtactacgtatgtgatcacgattatttatgggggactattagtaactaacaagattttatcaattggccagttggtttcttttatcgcgtatatttctaacatggtttggccaatgtttgctattggttatttgtttaatattctagagcgtggtagtgcaagttatgaccgtgtagaaaagttacttgatgaaaggcctttgattactgatgcacatgcagatccaaatattacttctcaagatttgcaaggtgaattaaaatatgacattaaatcatttgcatatccagatgagccagatattccagttttaaagcaagtcaatttcactttaaaacctgggcaaactttagggttagttggtcgagttggtgcgggtaaaaccacaattattcaactgcttttgcgagaatttgatcagtatgatggtcaaattactctgaatggaaaagatattagaaatattcaactaaaggtattactcagtcagatctcctacgttcctcaaaataatttcttgttttcaactagtatcggcaaaaatattgctttctcttctgaaaatgtagataaggatgatattgcagctgcagccaagaagagtgatttgcatgatgatgttttgcaaatgcctaaaggctatgaaactttagttggcgaaaatggcttatctctttctggtggtcaaagacagagaatgtcaattgctcgggcattgctaaaagatagtcagattttgattttagatgatgcattgtcagcagttgacgcaaagaccgaaactgagattttgtcatcattaagaaaagagagagctgataaaactacaatgatcgcggctcaccgtttgacttccgtgatggatgctgatttgattttggttctaaaggatggtcaaatcgttgaacgtggtaatcatcaacaactattagctgcagatggatggtatgcggaaatgtggcgtagacaggaattacaagcgaaagtaggtgaagatacagatgaataataacgaagaacagcatgaatctgtttggtctaaggcgataccatttaaagagcaagttgatatttttaagcgtttaatgggctttgttaagcaatttaaatttgaaatgattgttgctttagttggtgcatttattgttagtgtaattaatattcttttgccacgtggcttgcaatatttcttagatcactttctattgcatcaaagcacaacagtgcaggtgattttgtttgcaggttttctttatgctttaggctcaattttaaaggcaataattcagtttacttaccaatatttctttgctttaggatcagaaaaaacgctagagagtgtcagaagggcattgtaccgcaaactgcataagctagggatgcgctattttgatcaaactcctgcgggctcaattgtttctagagttactaatgatacgatgactttgagtaattttttgacggtgctatcaacttttgtgattggtgctttttcggtgattactgcgttagtagcgatgtttactactaatatagttgctgggtggttgattttactctttattccgattttattattagttgtttggctttattcgcaaaaaagctcacgtctttatcgtaattatcgtgagcgtcttagtcgaattaacgctaacttaaatgaatcaattgaaggagtatcggttatccaagaatttaatcaagaaaaacggatgactaataattttgaaggcgaaaatggtggtttaatgaatacacgcttcaacatgatccgagtaaattcattgttattatcgccattgacatcgctgctttattcgttagctttagccatttcattaatgtactttggttttccattacgtgaaacttttgttccagctggtgtagtctatgccttttcacaatacatttcgcaactttttaatcctatttcaactgtgatggatcaaatgacctttttccaagatgggattgttgcaggaaagcggatttttcggattcttgatgatacccaatatgaaccacagcaggatgctcaaaaaggattgacgattactaaaggaaaaattgagtttaaacatgtaagcttttcttatgatggcaagcatgaaattttacatgatatttctttcgtagttaatccaggtgaaactttaggaattgttggtcatactgggtcagggaagagctcgattattaacgtgatgatgcgtttttacgaattcggtcaaggtgaaatcttgattgatgacgttaatattcgtaaatatcctaaagaagaattaagaaaaaaacttggcttggtattgcaagaaccgtttatgttttatggagatatttcatctaacattcgtttgtataataatcaaattactgataatcagattaaagacgccgctaaggcagtccaagcggatcgctttattgaaagaatgccgggtaagtatcatgctaaagtgattgaaggcggagaagaatttagtcagggacaaagacagttaatttctttcgctcgaactttagtcacagatcctaagattttggttttagatgaggcaacagcaaatgttgataccgagactgaaactttgattcagcaaggactaaagcggctgagaaagggtcgaacgacattagctattgctcaccgtctttctacgattgccgatgcggatcaaattattgttttagacaagggacgcataattgaacggggtacgcatgatcaattgcttgcacaaaagggttattactataatttgtataccttgcaaaataatgaaaataaaaactaattgtttttcaggacgtttgtgtagtagcaacgtctttttttgatataatagttaaaaagtattaaataattatgaatatttataaggagcaaaaatgaaaagatattttacagttcgtggtggagctggcgacgtttctaagccagacttaaatgctaagccacaagataacttatacttggctgttaactcagaatggctatctaaagcagaaattcctgctgataagacatctgctggtgtcaattcagagcttgaccaaaaaatcgaagatcgagtaatgaaagactttgcggacattgcggcgggcaaagaaaagatgcctgagattaaagactttgataaggcagttattttgtataagattgcaaaagattttgctaagagggatgcagaaaaagctaatcctattcaaaaggatttacaaaaattaatatccttaaataattttaatgattttaaacaaaaagctgccgatttgtttatgggaccatatgctttaccgtttgtatttgacgtcgatgccgatatgaagaacactgatgtaaacgtactccattttggtggcccaagcacattcttaccagatactacgacgtatcaaactgctgatgctaagcaacttttggatactcttcaagaccaaagtattaacttactgacaatgtccggtattggtaaaagcgaagcacgagtttatgttgaaagcgctttggcctttgatcaaaaattagctaaggtagttaagtcaactgaggaatggtcagattatgccgcaatttataatccagtaacatatgctgactttattaaaaaatttaaatcatttgacatggctgatttcatggattctattttaccggttaagccagatcgaattatcgttatggaaccacgttttctcaatcatgctgaagaattattgaatgaagggaattttgctgagattaaaggatggatgctagttaaatacattaacagcgtagctaaattattgtcacaagattttcgtgaagctgcgtttccttttggtcaagcagttactggtacgccacaattgccatcacaaattaagcaagcttatcgtttggctaatggtgcttttgatgaagtagttggtatcttttatggacaaaaatattttggggcaaaagccaaaaaagatgttgaagacatgatccaacggatgcttaaggtatatgaagaaagaattaatgctaataaatggctttctgctgaaaccaaaaagaaagctgtgattaagttaaaggcgttggttttaaaaattggttacccagacaagatcgaagaaatctttgacttattacaagttgatccgaaaaagagcttgtatgaaaatgaagcggcaatgtcaactgtacgaacgaaatatatgcttaataagttaactaagccagttgaccgttcagtttggctaatgccaggtaatttgaataatgcgtgctatgatccgcaaagaaatgacttaacctttccagctggaattttacaggcaccattttatgacattaatcaatctcgtggtgcaaattatggtggaattggtgcaactattgggcatgaagtatcacatgcatttgataatagtggagcaaaattcgacgaacatggaaatatgaacaattggtggactgacaaagattttgctgagtttaataaacgagttggtcaaatggttgatatttttgatggcttacaatatggtcctgctaagattaatggtaagcaggttgttggtgaaaatattgctgatctagctggccttgcttgtgtagttcaaactggggaaaatgatggggcggatttgaaagatttgtttgagaattatgctcgtagctggatgcagaaacaacgccctgaggcaattaagactgaagttcaaacggatgtccatgcgccacaaccaacgagagtaaacattccggttcaatgtcaaaatgcattctatgatgtatttaacgttaagccaactgatggcatgtggcttgatccagaagaacggattactatttggtaaaattgaataaaaaaatagtcactggatttcaatttctagtgactatttttgatatgtaattatttatcaagcatatatttacgagtcatcggtaaagttttacctgatggtccctttgtcaataggtattggataacgtcgatgttaccagactcgaaactagcagcacaagcattaaggtacatatcccacattctacagaatctttcaccaaatttcttttctacttcaggacgaacggcattaaagttcttatcccaaatttccaaggttctttgataatgacgacgaagagtttccatatcagtaatttgtaggcctgaatcgatgatgtcagtaacaatttctggtaagcctggtaagtagccaccagggaaaatatacttgtttaaccaagcattagtggcaccaccttgttgacgggtaataccatggattaatgcaacaccgtctttgttaaggtacttgtagacatcagcaaagtatttaggtaagttttctttaccaacatgttcaaacattcccactgaagtaatgtaatcccatttttgatcaccaagttcacggtggtcttgtaatctaacttttgcgacatcttgtaagttatcgtcgtagattcgcttttgaactaatttaaattgctcctcacttaaggtaacaccggtgacttttaaaccgtattccttagctgcagtaagcatcagagttccccagccacatccgatatcaagtagggtcttgcctttttgtgggtggagtttgtttaagatatgatgtacttttgcaatttgagcttgttcaagatcatctttattgccatcttcgaagtgggcgcaggaataggtcattgttgggtcaagccacatcttgtagaaatcattaccaatgtcgtagtggctttgaatatcttcttcgctttgcttttccgtgtgtttttgcttaggcataaacttacggaacttagaagcacgcatgaatgaatcagcactttcataagcaccaacaagcaatttttggatattaccatgaatttcgatttttttatccatgaatccttcgcccaaagctagagaagcatttcgagtgatttcactcattggaatcttttcattaaaaacaatttcaatttcaggatcaccattgccataaacttcgctcttaccgtcccagtaggttaccttaacagaaaaggggaaagatttactaagcatcattttgtaaaaagttttttctaacaattgctttttcctccaatatttaaaacctaaaaattattttaacacttatattaaattgcacaggtaaagaaaaatcagtataaagcaatatttgttttatactgatttttacttatttagcaacgtagtggaaatttggatccatttccttatctaatttgttccaagcatcttcaagttgttgaaataaaatttgttcattttcatgggttagtttagttttacgatcaatggtaattggatcaccaaagttaacttctaatggcttgcgcttaagcagtcctttaaaagttaaagggccttggtagacaacaggtaccattggtttttttgacattttggaaattaataaaactccaccttttaattcagctgaatgtcgcgtgcctgaaggaaagataattaatgataactttccttctctaagtcccttaactggaatctttaaggctgatggtccagggttatttcgatcgactgggaaagcgtgagcatgatcaagaataaatcgtaaaaccggatttttgaataattcaattttagccataaacatgaattccattggactagcacctagtgcaaaaagcagtggttcccaccatgtacggtggggggctactaaaatataattgccctgaggcaagcgatccttatgatgaatgtgtagatgaccgtttaacacccaaacgatgaaacggacaatcggacgtataattttgtaaaacattgtctcctcattgattccttcatttgatgtaagctattataaaaatataatgacgagaaaggcaaatatttttatggtagatctgaaagataatgagcgaattgactacatgtatagcgataatcttcgtattattcaagataaaacggcttttagtttttcaatggatacattatttttagcatattgggctaaagacttgatccgtgataaagataaggttgctgatttatgtgcaggaaattgtgcagctacaatctatatggcttattttaatcgtgcccattatgatgcaattgaaattcaaaacgaagtttattctcaagcagttcgttcagtcaagcttaatgagatggaaaatcgtatttcagtttttcaggataatgtgctaaatgcaggacattttttgcggaaagatagttatgatgtagtaacagttaatccaccatattttaaagcacctaagggacatgaagttaatccagatcgtaaaaaagcaattgctcgccatgaacttttgattaatttagagcaaataattgaagtggctagtggcttacttaaaatgaaaggcaaaatgttaatggtacatcggccagagcgcttaggtgagattgcttattattgtatgaagcatgacttaagcatcaaaatggtgcagccatttgtgccacatcgcggtgaagatgctaatttaattattgtagaagccgtcaagcatactggaactgatggaactgttttgaaagatgctgttgaagttcatgaatcaaatggcgacttcactccattagtacagcgaatctcacgagaaactgcagatgacaaagctaaacatgaagcacagggtaaatattacttttatgtcttactgtgtaatgatggcagtttttatggtggttttactaatgatttagaacatcgtttgaaaatgcacaatttaggaaaaggagctaagtatactaaaacacggcgtcctgtacggatgatttatcatgaacagtttgacgataagcgtttagctttgaaacgagaatattggtttaaacatcattcacgtgcttggaaggaaaaatttttgcatgagcataatataaagttttaatccttgcatactgtaatcttttcttgtagaatatttgagtatgctgtgtcagcatatgaaacttaaaacacatcaagagcaatcatcatcgtggtgcccagggtagtggttagatgatgaaatgaacgcttgagaggatataaaaccataggaggaatttaaatatggcagacgttgttacaatgaagcaattgcttgaagctggtgtccactttggtcaccaaactagaagatggaacccaaagatggctccttacattttcactcaaagaaatggtatctacatcattgatttgcaaaagactatcaagatgttagatgatgcttacaactttatgaaggctgttgcccaagacggtggcgttttcttatttgtaggtactaagaagcaagctcaagattcaattgctgaagaagcaactcgtgcaggtcaatactacgtaaaccaacgttggttgggtggtactttgactaactggtcaactatgcaaagccgtattaagagattaaagcaattaaagcaaatgtcagaagatggtacttttgatgttcttccaaagaaggaagttgctctcttaactaaggaaatggacaagcttgaaaaattctttggtggtattgaagatatgccaagaattccagatgtattgttcgtagtagaccctaagaaagaaaagattgctgttcacgaagctaacattttgggtatcccagttgtagctatggttgataccaacactgatccagacccaatcgacgtagttattccatcaaacgatgacgctattcgtgctattcgtttgattgctggtgctatggctgatgctgttgttgaaggtcaacaaggtcaagatgatgaatcagttgaagttgacttcaaggaaaatgcagacggttcagaagaaatcgttagcgctgaagaaaacccagaagactagattttactattagttccgtaggaggatctattaatggcacaaattactgcaaaattagttaaagaattacgtgaacgtactggtgctggcgttatggacgctaagaaggcattagtagaagttgacggtgacatggataaggctgttcaataccttcgtgataaaggtatggctaaggcagctaagaaggctgaccgtgttgcagctgaaggtttaactggcgtttacgttaatggtaatgtggcagctattactgaagttaactcagaaactgactttgtttctcaaaacgacaagtttgttaacttggtaaatgaagctactaagactattgctgaaggtaagccagctgatatggaagcagctaaggaattgaagatggctgatggtactactttagaccaatcattcgttaacgcaactgctacaattggtgaaaagattgttttacgtcgttttgctttagaagaaaagaatgacgaccaagaatttggtgcttaccaacacaatggtggccaaattggtgttatcactgttttagaaggtgcagatgctgcaactgctaagcacttggctatgcacatcgctgctatgagccctaaggttatttcaccagacgaattagatgatcaatttatcactgatcaattagctgtgatgaaccacaagattgaccaagacaatgaaagtcgtgcattggtacataagaaaccattacctcaccttgtttacggttcagctaagcaattaactgatgatgttttggctaaggctaaggaagacatcaaggctgaacttaaagaagaaggtaagccagaaaagatttgggacagaattattcctggtaagatgcaacgctttattgatgataatactcaagttgacaagcaatttgcagtgttatcacaagactacattatggacgatagcaagactgttggcgaatttttgaaggaaaaaggcgctaagttagttgctttccaacgttacgaagttggcgaaggtatcgaaaagaagcaagaagacttcgctgctgaagttcgtgaacaaatgaagtagtcattattacataattatcatagaaaggaggagtacaccgtgtgctccttctttttttgtaaaaattttgtagtgttttaagtgttaaaagacattgcggcattagatatggtagaataattaaagctattagaggaggtcattatgagtcaagttaaatataaacgtgtcattttaaaaatatcaggtgaagctttagcaggtgacaagggtacggggattaatcctactgtaattggtcacttagctaaagaaatcaaatcagttcatgatttaggtgttgaaattggtatcgtctgtggtggcggtaacatgtggcgtggtgaaactggcgctaagttgggtatggaacgtgctcaagcagattacatgggtatgttagcaactatcatgaatggtttagctttgcaagatggtcttgaaaaaataggtgttcctactagaatgcaaacttcaattgaaatgagacagattgcggagccttacattagaagaagagctttgcgtcaccttgaaaagggtcgtgtagtcatttttggtggtggtactggtaatccatacttctcaactgatactactgcagcccttcgtgcagctgaaattggtgctgatgtaattttgatggctaaaaacggtgttgacggtgtttactcagctgatccaaagactgatccttcagcaactaagttctcagaattaactcaacttgatttaatttcaaaagacttgaaggtcatggatagaactgcaagttcactttcaatggatactgaaattccattaattgtctttaacgttaatactccaggcaatatcaagaaggttgtattgggtgaaaatattggtactgttattagaggtgataaataatgaataacgaaactattgaaaaagcaaaaactaaaatgacggattctattaaggtttatcaaaagagattagcttctatccgtgcaggtgttgctaacgctgctcttcttgataatgtccaagtagaatactatggggcaccaactccattgactcaaatgtctagtattaccattcctgaaccacgtgtattgcttattactccatatgatcaaaattcattagatgatattgaacatgcattgttggcttcaaacttaggattaactccggcaaatgatggtaaggtaattagattagtaatccctcaactcactggtgaaagaagagaagaaattgccaaagaagttggaaaatttgcggaagaagctaaaattgctgtgagaaatgttcgccgtgatgccatgaatactttgaaaaaagatgaaaagaatggtgatattactgaagacgaacaacgtaacttagaaaagcaagtacaaaaagtaactgatgatgctgctaagcagattgaccaacttgctgatgaaaagcgtaaggaaattactcaaggttaaagatgagtaataaggataatgaattaaatcatttagccattattatggatggtaatggacgttgggcaaaaaagaggcatagacctcgttttgttggccatcgagagggaatggataatgttgagcggattactttagctgctgataaattaggaattaaagttttgacactttatgctttttctactgagaattgggctcgtcctaaagaagaagtagcttacttaatgaacctccctgttcgcttttttgataaatacatgccaacattgatggaaaataatgttaaggtaaatatcatgggctatttggatgaattgcctgaaaagacttatcgcattgttcaacgtgcaatgtcagagacggccaataatacaggcttaattctgaattttgcttttaactacgggtcaagaagagaaattacgtctgctatgcaggagctcggtggaatgattgaagctggttcactaaaaagcgaagaaattactgaaaaaatgatttcagaccatttgatgactaaaaactttggtccatatcaagatccggatttattaattagaacgtccggtgaacagcgaatttctaatttcttattatggcaattagcatattcagaacttgcctttagcgaaaaaaattggccagattttgatgaaaatgatttaaaaaaatttgtagaagattataagcaccgtaaccggcgctttggtaaagtagacgaatcggatagttaaatatgaaacaacgtacaattacggcaattattgccttatgtctttttattccaattgtgctcgcaggtggcctttggatggattggctgactgtattattcgcagcagttggcattagcgaaatctttttaatgaagaaacaaatcttagtttcttttaattttttgttagccttacttgcaactttaacctggacagttccagactcattctttaaagtatttccttcaaatatcactaaattaggtgtgttttatggaattattatgttgttcttgacctggactgttctttcaaagaataaaaccacttttgatgatgtaggtgtatatattttggctgcactttacattggaataggttttcactatatggcagccattagagcatacccacaaaacggtttagcattgctgggttgtgtttttgttgttgtttggtccactgatatcggtgcctacatgattggacgtaagattggaaaacataaattatggccagttattagtcctaataaaacatgggagggctcgatcggtgcagttgtttgtgccttaatttgtagtgccatctatatggcaattcttggcagcttgggtattaactttggtgtatctgaattaacgatgattattctggcctttttcttatcaattgttggtcaaatgggtgatttagttgaatcagcttacaagcgtttctatggtgtgaaagattccggaaagattttgccgggtcatggtggtatcctggatcgctttgatagtatgctgtttgtattgccagtagtggctacaattttaggtattgttcattaggagaattttttattgaagggtatactaatctttatcgtcgtctttggtatattggtatttgtccatgaatttgggcattttatcgtagccaaaaagtcaggtattttggttagagaattctcaattggaatgggtccaaagctttttcaaattagacgtaaccccaccacttataccattcgttggttaccacttggtgggtatgttcgtttagcaggcgctgacgatgaaagcaagctggatcctggtatgacggttgttttacaattgaatgaacaaaatgaagtagtgagaattgatgcttcagaaagcgaaataccaattgaaggaattcccgttcaagtaacaaaggctgatctagtagacgatttaataattaagggttacgaaaatggcgatgaaaatgatccagtaacttatcacgtagctcatgatgcaactattattgaaaaaaacggaactgaattaattattgcgcctcgagatacacaatttaatcaagctaatgtttggcaaaagttggcaactaattttgctggaccttttatgaacattcttcttgggtttgtagtatttttaatctggacatttacagttccaggtccagcaacaactacagttggatcaactcaggctaattcaccagcgcgtgatgcaaaaattgtgactggtgatcagattgtggcaattaatggacaaaagattaataattttgatcaagtgtcacagcagattaatcaaagtaaaggcaaggtcttacactttgaattaaagaaaaatggtcaaattaggaaagttacagttaagccaaaagctcataaaattcaaaaacaaacagtttatcaaattggtattgtagctaagagcaatgagaatgcagttgttaaattaaaacgtggctgggatacagctatttcaactaccggtctgattttcagagccgtaggtaacttatttagccactttagtttgaataaattatcaggtccagttggaatttattctcaaacttcacaagtttcacaaatgggctttacttatgtattagcctttttaggaatgatttcgattaatttgggaattgtcaatttaattccaattcctgggcttgatggtggtaaacttttattgaacttaattgaattagttcgcggtaaaccgatttctgaagaacatgaggcaattgttgaattaattggtttcggcttattattagttttaattattgcagttacaggtaacgatatctatcgctattttattaaataattatattttttactttaggagataagaatgcgtcaatcaaaattttttatgccaactttgaaggaagcaccatcagatgcagtggctgaaagtcataagctgatgattagaggtgggtatattcgtcaagtcacagctggagtttatgcttatcttccattaggctaccgtgttttacgcaaggctgagggaatcattgaacaagaaatggataaaattaatgttccagaaatgattatgcctcatttacttcctgcaactttgtggcaagaaagtggccgttacaagaaatatggtgcagaaatgttcaagttaaaagatcgtcatggacgtgaaagcttgcttggacctacacatgaagaaacttttaccgaaattattgctaagaacttaaagagttacaaacaaatgccacttgctttgtatcaaattcagactaagtttcgtgatgagaatagacctcgttttggccttcttcgtgggcgtgaatttgtaatgcttgatggttacagttttgctgcaactcgtgatcaattggatgaacaatttgatgatcaaaaaaatgcatataagcgtatctttaaacgtgccggtgttactgttcaccctgtaattgctgactcaggtacaatgggaggtaaaaactctactgaatttcaagcccctgctgctatcggtgaggatacaattgctactaatgaaaaaggaacatatgctgccaaccttgaaatggctaagagtattgatactttcaagcaagaaccagaagatgctaagcaattaactaaggtagctacgccaggctgcgatacaattgaaaaattagctaaattcctcgatgtaccagctactagaattgttaaaagtattttatacattgctgatgaccaaaaagttttagtattaatccgtggtgacaagcaaattaatgaggttaagttgggtcatatccttgacgctgatgaggttcatgaagcaaatactgctgatttaaaggaaatcactggtagtgaaaagggtggcgttggtcctgttaatgcagattgggctgataagattattgcagatgaaactgttaagaatctttacaacgttgtagttggtgcaggtgaaaccgattatcaatttgaaaatgctaacttagaccgtgatttcaaggtggatgaatttgctgatattcggactgctaacgaaggtgaaccagatcctgttgatcatttaccgcttaagttcactacttcaattgaagttggtcacattttcaagttgggtacttattacactaagaccatgggtgcagatttcttagatcaaaatggtaaagcaaagcctgtcatcatgggttcatacggtattggcgttactagaatgttatcagcagctgttgaacaacacttaactgaacgtggtgttgcatggccaaaggaaatcgctccatttgcaatacatattgttcaaatgaagatgaataaagaagatcaaactgaattagctgaaaaacttgaaaagaaattcagtgaaaagtatgatgttttatacgatgatcgtaaagagcgtgctggtgttaagtttgctgatgcagatttagtcggtgcaccaattagaattacgattggtaagaaggctgctgatggcattgttgaagttaagcgaccaactgatgacaaagcaaccgaaatgtcaattgatgaattagataagtttgtaaatcaagagttaggataatttttgtggcaaataaaaacgatcttttcttaaaattgctcaaacaggttcaatttcctgatagttttgaagacaatgcgcttctacaaaaagggaaaattgaaaacgtggatgtttacgctaaagaacacaggtgggatatccacgttttttttgatactcccttgatgtatgacacctatgtagcattaagaaaagctgtagaagaaactttttcttcttttgtaaatgtaagattttatgttggaacagctgatggttctgatcaatatttaccagattattggcattatgtagttcaaaattcaaatattttgcaacctgtggctcgtgaatttttggctggccaaaaacctaaaaaagttgatggccgctgggttattccagttgataataatgtgattgatggtttaattgagcagaaggctttagatgatttagctgaaaagatgcgtgattatggcttctttaatttgaaatttataactcagctggatcagacaagttctaaaaacaatttagaaagtttgcaggagttgcaacaagagcatgaaaaaagcatgcaggaagtctttgagaagacgccagacaaacctaaaccgcaacaacctaaacagtatccaactagacgtactaattatggtaaacgtaaattagatgaaaatgctccaattacacaaattaaagagctggaagatggcgtacgtaatgtagtaattgagggaaatatttttaatgttgaaactcgtgagcttaaatctggtgcaatcattttttctggcgaaattacggattatagtgattcaattgcatttaagaaatttgtttctaataaagatgaaattgaagagctatctgcaattaaaccaggaacttgggctaaaatgcaggggtcagttgctgatgatcaatatatacatgatgtagtttttaatattagtagcttagagactgtcgagcatgttgggcgaactgaaaaatacgaaggtgagcctaaacgagttgaactacatgttcatactaatatgagtcaggttgacgcaactaatactccgacggactttattaaaactgctaagaagtttggacaaaaggcaattgcgattaccgatcatggtgatgttcaatcattccctgaagcatatagcagtggtaaagcactggacatgaaaatattgtatggtgtagaagctaatatgattgatgatcatgctttactagttttgaatcctgcaccgatgacctatgaagaccgcgagtttgtaatttttgacgttgaaactacggggttgtcatctgtttacgacacaattatcgagattggtgcggttaagatgaagaacggagaagtgcttgaacgctttgataagttcattaatccgcaccatcctttaagtgagcaaactattaatttgacttcaattacagatgaaatggttggcgcagccgatgatgaagcagttgtcattaagcaattccaagacttttatggcgatcgaccactgtgtggacataacgttcaatttgatgttgggtttgttaatgcagcattaagacgtgcagggctaaaagaaattactcagccagtagttgatacacttgaagtatcgcgtttactacatccagagcagagtcgccatactttagattcattagctaagaagtataatgtttccttggaacaccatcaccgggcaaatcaggatgctgaagcaactggctatttaatgtttaaattgttagatgcttttaataaaaagtatcatgaaaataatttgaataatttgaatggctatgcagcacatggtgaagtttataaacgagcccgtccttcccatatgacagttttggcaaaggatcaagctggattaaagaatctttacaaattagtatcaattgccagcacgaaggactttttccgtattcctcgtacgccgaagtcagatttggctcgtttgcatgatggtttactttatggttctggttgttggcaaggcgatgtctttatcgcaatgatgcaaaaaggttacgacgaagcaagagaaaaagctaaattttatgattatcttgaagttcaacctccagcaacctattcgcaattaattgctgatggtttgattaaggatgaagatcaattacatgaaattattgaaaatattattaaattagggaaggaattaaataagcctgtagttgcaactagcgatgcccactacgttgaccaaaaggacgctatttatcgtaaaatcttgattgcggctcagagatcaaaccctagtcgaaataagccacagccagatttgcatttctattcaacacaggaaatgctagatgcattttcattcttaggcgaagatgtggctaagaaaattgttattgacaataccaataaaattgctgatgaattgtcagaaattcagccaattaaagatgggttatacccaccacatattgaacatgccgatgaagaaatgaagaagttgacctatgataaggcttatgaattatatggtaagccattaccgaagattgttaaggatcgaatagatttggaattaaattccattatttcgaatggttatgcggttatttacttgatttctcagcgtttagtagctaagtcaaataaagatggctatttggtaggttctcgtggttctgttggctctagtctagtagcaacgatgtcaggaattactgaagttaatccgttagctccacactatcgttgtcctaactgtaagtattcacaattctttgaaaatggggaatatggttctggttttgacttgcctgataaagattgtccaaaatgtggaactccattagttaaagatggacaagatatcccatttgcgactttcttaggatttcacggcgataaggttcctgatatcgatttgaacttctcaggtgactatcaaccagtagcccataattttattcgagtaatgtttggaccagataattcatatcgtgctggaacgattgcgactgttgcggataagactgcttacggttatgctaaacactacgatgaagagcatgatttaaagctaagaaatgcggaattagaccgtttggcagctggtgtccgtggtgtcaaaagaactactggtcaacaccctgcaggaattgttgtagtgcccgatgatatggacatttacgattttacgccggtatcgtatccagccgatgatgtaaatgccgcttggttgattactcactatgacttccactctattcatgataatattttgaagtttgatattctgggacatgatgatccaactatgattcgtcacttgcaggatttgtctgggattgatccattgactattccacccgatgaccctggagtcatgtcattattttctagtcctgatattttaggtgttactccagagcagattcaatcagaaactggaactttgggtgttccagaatttggtacccgttttgttagaggaatgcttgaggagactaagccaacgacattttctgaattattacagatttcaggtttgtcccatgggactgatgtatggctaggaaatgctgaggacttaatcaatcaaggaatttgcaaactgaaaaatgtaattggttgtcgtgacaacatcatgatggacttaattcactggggcgttaagccagaagttgccttttcaacaatggaatccgttcgtcatggtcgtggcatcagcgatgaaaatatggctattttaaagaaaaataagaatattccagattggtatattccttcttgtctgaagatcaagtacatgttccctaaggctcacgctacggcttacattttaatggctctacgaattgcttggtttaaagtatattatcctgaaatctattacacagcttacttttcagttcgtgccgatctatttgatttggttgcaatgagtcatggtaagaatactgttaaggctgcaatgaaggaaattcaggataaaggaaacgatgcatcagctaaggataagagtttgatgaccgtgctagaaatagctaatgaatgtctagaacgagggattaagatcaaaatggttgatattgatcaatctgaagcaactgactttaagatcttagataagcatacaattttagcaccgttcaatgctgttcctggtttgggggataatgcagctaagcagattgtagctgctcgtgcagaaaagaagtttttgtctaaagaagatttagctaagcgcggtaaagtatcacaaacaattatgaattatttcgaagaaaatggtgtcttggaagggatgccagatgaaaatcaattatcacttttctgatagttaaattttacaagatcaggtaaaacatggtatactacgtatgaagttcgaataggtaaattcgagtgagcagtgatgctcactctttttattacggaggaaaatttttgtctaaagttatagattctgttcgtccagttgtcgaaacaattattgatgaacatggtgacatgttggttgatatggaatacgttaaagaaaaagggcaaaattatttacgcatttatgttgatcgccaaccaaacggtattgacattgatgagattgcagctttaagtgaacttgtttccgaaaagctggatgctcttgatcccgatccacttccagatccctatgttttggaattatcatctccaggggcagaacgaccaatcaaaacaaaagctgattgggaaaaagctctgaatgattacattcatgtcggtctttatcaaaagattgagaataaaaaaatgtatgaaggtacactcaagtcttataatgatgacgaagttgtattagaaataaaagataagacaagacgaaaaacattaactgttccccgtaagttaattgcaaatattcgttttgcaattgaattttagaaaggttgatcaaaaacttatgtctaaagaaatgctagaagcgtttgctactttggaaaataccaagggcattaagcaagatattattgttgatgcaattaaagccgctttggtagctgcatacaaaaagaattataatcaagcacaaaacgttgaagttgattttgatgaaagaaaaggtaacttcaaggtaatggcagttaaaactgttgttgacgaagtgcaagatgaccgtcttgaagttagtttaaaggatgctttaacaattaatcgtgcttatgaagtaggcgacgaaattcgttttgaagtaacacctaaaaattttggtagaattgccgcccaaactgctaagcaagttatcatgcaacgtctacgtgaagccgaaagaaaacatattattgatgaatattcacaatatgaagatgaattggttactggtaccgtggaaagacgcgacaatcgtttcgtttatgtaaagattggtaatgttgaagctgttatgcctcaccgtgatcaaatgccaaatgaggtttacaatccccaagaccagattcgtgtactagtaactcatgttggctccgatagcaagggtgcacaaattacagtctcaagaactgctcctgacatggttaaacgattgtttgaacaagaagttccagaaatttatgatggaaccgttgaaattgtttcaatcgcacgtgaagcaggtgacagaactaagatggctgttaagtcaaatgatcctaacatcgatccggtaggtacctgtgtaggccaaaagggtgctcgtgtacaaaatgtagttaacgaacttggcggtgaaaatattgatatcgttaagtatgaagaagatccatctgactttattgctaatgcattaaatccagcagaagtgattgcggttcaatttggtgatgatgaagaagaaaaaagtgctttagttatcgtaccagattaccagttatcacttgcaattggtaagaaaggtcagaacgttcgcttagctgctcgtttgacaagctataagattgatattcgtcctgaatctgaagtagaatttgtagatgaaaaaacaaatgatacagctgatgctgcagatagtagcgaaacttctgaaaatgttgaaagtacagatgacgctgctgacgttgaaagctcagatgatacaactactgtagaagattcaagtaaagaagataaaactgaagaataggtgattttttgaaaaaaagaaaaatcccaatgcggaaggatttattaaccgatacaatgcagcccaagaaggaattagtacgtattgttatcgataaagaaaaaaatgtgtcagttgatccaacaggtaaaaaggctggtcgcggcgcatatgtttcccttgatccaagtaagattgaagctgctaaagagaagaatgtattagaacgtagtttaggtgcgaaagttccagatactttttacgatgagctttactcttatgttgatcatcaaaaggcaagaaaagaattatttggtgataaataagattgcaaaatagacaaaaagcaattaatttgttaggtttagctgagcgtgctggtaagttaactaccggtacagagacagtcattaatgaacttaataagcacaaaatcaaagcggttattatggctagtgatgttcaagacaacacggcagaaaaagtaaaccgcgctgccagaaaagacaatattcctatgataactatgtttactgccattgaattgtcaaaggcaattggcaaaaaacgcaaagttttaggattaactgatgctggttttgctaaggcgttagttaaaaaaataaatgaaggagtgtgattggatggcaaagaaaagaatttatgaaatcgcaaaagaagtcggcgttgataacaaagttgtagtccaaaaagcaaaggatttaggcttagatgtaaagaatcacatgtcatcagtagatgattcacaggttgcaaagttaaagaatagtttccaaaactccgctcctgctgcaaaatcttctaataaaaagaataaaataaaaatctctgtttcttctattcgcaaaaatgaaaagaagcaagaagataataatagttctaagaattctaagagacgcaataataaacgtcgttcaaataatcacggtcatgagaataaaaatgatcgtagaaataatacaggtaagccaaaggcagctgctttgttacaacaatttaaacaaaagcaacgggcagaagaagggcaacttaatcgtgaagcccaaaaagccagaaaagaatatcatgagcaattaagacatccaaaacaagaacagccagtgaaagataataagaaaacaagcaaccacaaagataacaagaagaaagcagaaccagtagaaaagaaagttattggtcctaagattttaaagccttctccagctcgtttgaagaagcaacagcctgaagcgactaaagaactagttcaagttactattcctgaggctcctaaggaagaaaaacgcggcaataatcgtggtcgcaacatgggaaagccaggacgcaagggtaaaaatcaatttggcaatggtcgtagtgaccattcagatcgttcagagagaaagcggcgtaagaataaaaaacgtcaacaagagcaaaagccaaagaaaacacttactaagcgtaaggaacgtccattaccagaaacattagtttacgaagaaggtatgaacgctcaagatattggtaagttaattcaccgtgaaccagctgaaattgttaagaaactcttcatgcttggcgtgatgactaaccaaaaccaatctttggataaagatacaattgaacttttagctgctgaatatggtatcaatgctgagcaaaaagttcatgaagacatctctgatattgataatatctatgacaagagaatggaagagtcaaaggaatctaaaaaccaggttaaacgcccaccagttgttacaatcatgggacacgttgaccatggtaagaccactttacttgatcgtcttcgtcatactcatgtttcagctcatgaagctggtggtattactcaaaagattggtgcttaccaagttagattagatgatcgcttaattacattcttggatacaccaggacacgcagcattttctaacatgcgtgcacgtggtgctgaaattactgatattgttgtactggttgttgctgcagatgatggtgtaatgccacaaactgtagaagcaattgaccatgcaaagagtgctaatgttccaataattgtagcaattaacaagatggataagccaggtgcaaatccacaacacgtaactgaggaattaatgaaatacaatttgattcctgaagattacggtggtgatactatcttcgttaatatttcagctaagacaggtcaaaatgttgatgacttattacaaatgatcttgttgcaatctgatgtgatggaacttaaggctaatccaactgaaatggcaattggtactgtgattgaagctcgtttgtcacgtggtcgtggacctgtagcagacgttttaatccaacaaggtacacttaatgttggtgacccgattgttgttggtaacacttttggtcgtgttcgtactatgactaatgatcgtggacgtcaagttaagaaggctacaccatcagaacctgttgaaattactggtttgaacgatgtgcctgaatctgctgataagttagttgaatttaaggatgaaaagaccgctagaagtgttggtgaagctagagcacaacaagctttacaaaagtctcgtgaaaatgttcaacacgtaactcttgataacctcttcgatactatgaagaaggaaaacatgaaggaagttgacattgtcttgaaggctgatgttcaaggttctgtagaagctttacaacaatcgcttgaaaagattgaagttgaaggcgtacgtgtaaatatcattcactcaggtgtaggtgccattaatgaatcagatgtaactttggctggtgcatcaaatgcatttattattgggttcaacgttcgtccaactgctactgctaagagccaagctgaaaccgatggcgtagatattcgtctttacagcattatttacaaggctattgatgatgttactgctgccatgaagggtatgcttgaaccaacttatgaagaaaaggttatcggtaatcttactgttcgtgaaacttggaaggtttctaaggttggtacaattgctggttccttcgttgataagggcttggttaagaatgattctaagattagagttattcgtgatggtatcgttaagtatgatggtgaaattgcttcacttaagagatttaaagatgatgttaaggaagttaagcaaggtaacgattgtggtttaacgattaaggactacaacgacattaaagttggcgacgaattcgaagtttacgaaatgcaacaagttgagcctaagtaattactattaggaggaaaacatgaagcatagaattggtcgtgttgaaggtgaaattctacgcgaattaaccaagattttacaaaagaatattcgtgatccgcgcttaagtggtgtaactattaccgcagttgaatgtacgaatgatctttcatatgcaactgtttattacagcctgctaactgaagatgagcataaggaagaagaggttcaggcaggttttgaaaaggcaaaaggcatgatgcgtcatttgcttggtcaaacattaactgtttataaggttcctgaattaatttttaaacgtgataattcagttttgtatggtagtaagattgaccgtttgattgcagaagttaagaaacaagatgctaagcgggaaagcaaataaaaaagagggcgccgtgatggtgccctttttttgttgaaaagaatagggaataattatgttaaacggaattttagttattgataaagataaagggatgactagtgcagatgtagtttatcatttgcgccgcgtattacatattagaaaaataggacatgctggtacgcttgatcctgaggtgacaggcgttttaccaattgctattggtcaggctactaaattaattgaaatgatgcatactaggccaaaagaatatattggcacgggactatttggttatagcacagatagttatgatgcaactggaactgttttaaaagaaaaaaagttgattcagcctttttctggtgcagaaattcaagaaaatatgaataaatttgtaggagaaattgttcaagtgcctccaatttattctgctgttaaagtgaatggtaaacatctttatgaatatgcgcgtgaagagattgaagtcgagcgacctcagagaaaggttgaagtcaaacaatatgatctaactaaagaaccagtttttgatataaatactgggcaagaaagctttgattttaagattaaatgcagcaaaggcacttatgttagatcgttagttaatgatctaggtgaaaaattagattgccccgcaacgatgacttatttgagaagaacagctagttctggctttgatattacacaagcagtaaaattaaaggagattgaagagaatccgaaaaaggccactgaacttatacagccgattgatgcattttttaaggaatacactcaggttgatttaactgaagaaaagtggcttaaagttaaaaatggagcgggtatttcgcttgaaactaatgcgaaaaaagttgcactacgatacaataaaaaggtgaaagcaatttatgaaaaaaaaggaaagctttatcgcccaagcttaatgctgttgcaaaatgaataaatgaaatgaaggaattagctgtgaaaatcgttcatttaacatatcctgttaaggaaaatattttatctactagaattgtgcttgcccttggcttttttgatggggttcatttgggacatcagcgcttaattaatcaggctaaagaaattgcattacagaagaaattgtcattagttgtgttgacctttgatcgacatcctaaggaagtttatgagtcgaaacgagattttaaatacttagaaactttggaagaaaaagctaacaaaatggcggaattaggagtagattatttggctgttttaccatttactaaaaatttcagtcaaatttctgcacaagaatttgtcgataatgtaattgtcagattaaatgctgataccgttgttgctggctttgattacacttatggttctaagaatattgcaaatatggctaatttaccccaattttccaaagggcgttttaatattgtagtgatgccaaagcaaacttttaacggtagaaaaattggctcaactgaaattcgtcaagcaattaaggatggtcagatgaaattagccactgaattaatggggcaccattatgtaatgagtggtatcattgggcatggtaaacgaaatggtcataagctaggctatccaacagctaatttgatttgggcagaacataaggtgattcctaaaattggagtttatgctaccaagactaaagtaaatggtaagtggtataactccatgactagcgttggctataatgtaaccattaatcaggacaagaagatatatattgaatctaatatttttgattttaatgaagatgtctatggtaagccaatgaagatcaaatggtataaatataccagaggtgagaaaaaatttgccggattacctgaactgaaagagcaacttgaacgagatgagcaagaaattagggcttattttaagcaaaagggttaagaagctacgtactttgaaaaaagtgcgtattttttgaataaaattagcaatctacttgatttagtgctaatttctggtatcatattaactgttagcacctgagagatgtgagtgctaaaagtgagggcgatataatatgttgaccgagcgtcaagagcttattttaaaaacaataattacagactttacacaaagtcatgagccagtaggctcaaagaccgtaatgaagcagttgccaattaaagtttcaagtgcaacgattagaaatgaaatggccgtgttggaagagcaggggttaattgaaaaaactcactcttcaagtggtcgaattccttcaagcgagggctatcgttattatcttgataatttagttgagccgttgcaattaccagagtctgtttataatacaataggaagccaattagatcgaccttttcatcaagtaaatgaaattgtacaagaagctgcacgaattctgtcagatttaactaactataccgcatttgcggaaggacctgagagtcatgatgttagagtcacaggatttagaattgtaccgctgtctcaacgacagattatggcaattttggttacaagtgatggtaacattcaaaatcaggtatatgctttgccacataatattcacggcgaagaaattgaaaaggctgtccgcatgattaatgatcagttagtcggaaagagcctaaatgaaatcaacgtttcgttgctaagtgaattagctaaaaacgaattaggcggcgaacatgtgactgaattgcttagtttagttgaagatgtcgtaaaagatgcagctagtgagcagatgtatgtggatggacagattaatttgctcaataatacttctgaacatgatgtaaatgacattcgttctttgtacgagttgattgatcataataatctgttcactaatttaatggatgcaaaggtggatccaaagtctggaaattattcagtaaaggttaagttgggatctgaattacccaatgatttattaaaaaattatagtttgctgacagctgagtacagcgttggctcccatggtaaaggaactattgctttacttgggccaacgaatatgccatattcacaaatgattgggttgcttgaatattttagaaatgaactagctaaaaagttgcttgattattatggcaagtttcaataaaggaggttagccgtgagtaaagaagaatttccaagtgaaaaaaatctagagcaaaaagaaaagacttctgagcctaaggctaaaaaagaagccgataaaggtgaagaaaagaagcaagaaaaaaataaacaagatcaaaaattagctaaagaattagctgatttaaaagataagaacaaggatcttgaagataagtatttgcgtagtgaagcagaaattcaaaatatgcaaaatcgctacactaaagaacgtgctcaattaattaagtacgaatctcaaagcttagcgaaggacattttgccagcaatggacaatttggaaagagccctaagcgttgaggccgatgatgatgtgtctaagcagttaaagaagggcgtgcaaatgaccttggatgcacttgtgaaggcaatgaaagatcacggtgtagttgagattgaggctgatggcgttaaatttgatccgacattacatcaagctgttcaaacagtagcagctgagaatgatgatcaaaaagatcacgttgttcaggttttacaaaaaggatatcaatataaggatagaacactaagaccagcaatggttgtagttgctcaataagagaggaagctaatatatgtcaaaagttattgggattgatcttgggactactaactcagcagttgcagttcttgaaggtaaagaaccaaagattatcactaatccagaaggtaaccggactactccttcagtagttgcatttaaagatggtgaagttcaagtcggtgaggtagcaaagcgtcaagctattaccaaccctaataccattgtttcaattaagcgtcacatgggtgaagctgattataaggttaaagttggtgataaggaatatacaccacaagaaatttcagcatttattttacaatatattaagaaattctcagaagattacttgggtgaagaagttaaggatgctgttattactgttcctgcttacttcaatgatgctcaacgccaagctactaaggacgctggtaagattgctggtttgaatgtgcaaagaattattaacgaaccaactgcttcagcattagccttcggtttaaataaagaccaagatgaaaaagtcttagtatacgaccttggtggtggtacttttgatgtttctgtattgcaattaggtgatggtgtcttccaagtattgtcaactaatggtgatactcatcttggtggtgatgactttgatcaccgtatcatggattggttaattaagaactttaaggatgaaaatggtgttgatttgtcgaaggacaagatggcaatgcaacgcttaaaggatgctgcagaaaaagcaaagaaggacttgtcaggtgtatcaagtactcacatctcacttccattcatttctgctagcgaagctggtccattacaccttgaagcagatttaactcgtgctaagtttgatgaattaactgctgacttggtagaaaagactaaggtaccatttgacaatgcattgaaggatgcaggtcttactgttaatgacattgacaaggttattttaaatggtggttctactcgtattccagctgttcaaaaggcagttaaggaatgggctggtaaggaacctgaccattcaattaaccctgatgaagctgtagctatgggtgcagcaattcaaggtggtgttatctcaggtgatgttaaggatattgttttacttgatgttaccccattgtcacttggtattgagaccatgggtggtgtcttcactaagttaatcgacagaaacactactattccaacttcaaagagtcaaatcttctcaactgcagcagataatcaaccagctgtagatgttcacgtattgcaaggtgaacgtccaatggctgcagacgacaagactcttggccgctttgagttaactgatattccaccagcaccacgtggtgttcctcaaattcaagttaccttcgatatcgataagaacggtattgtaaatgtatctgctaaggatatgggtactggcaaggaacaaaagattactattaagagttcatccggtttatcagatgaagaaattaaacgtatgcaaaaggatgctgaagaacacgctgatgaagataagaagcgtaaggaagaagcagaccttagaaacgaagtagatcaattaatctttactacagataagactttgaaagatactaaggataagctctctgatagcgatcgtaagccagttgaagatgctcttgaagctttgaagaaagcccaaaaggacaacaacttggatgaaatgaaagaaaagaaagatgctttatccaaggctgctcaagacttagctgttaagttgtatcaacaaaatggtggtgctgctggtcaagctggtccacaagcaggtcctcaaggcccacaaggtggtaattcaaataatggcaacaacggtaatgcccaagatggtgaattccacaaagtagatccaaataagtaatgggtttataattaaacaaaaggagaaaagaactacccattgagtagttcttttcttttgagaatacaaggagttcaaatagatggcacaagaagattactataaagtacttggcgtagatcgtgacgccagtgatcaggaaataagtagggcatatcgtaaattagccaaaaaatatcacccagatttaaaccatgaacctggagctgaagaaaagtataagcaggttaacgaagcctatgaggttttgcatgataagcaaaaacgtgcgcaatatgatcaatttggttctgctggtgtaaatggtcaaggtggctttggtggtggagctggtcaaggctttggcggtgccggatttgatacttctggctttggtgattttggcgatatctttggcgatatttttggtcaaggccgtcaacagagggttgatccaactgcaccacaacgtggccaagatttggattatcaattgacaattgattttatggatgccattaagggcaaaaagacccaggtcagctatactcgaagcgaaacttgtgaaacttgtggcggtaatggttgtgaaaaaggtacacatccaattacctgtgataaatgtcatggaactggttatatgacaattactcaacaatcaatgttgggcatgatccgtcgtcaaaccacttgtgacaaatgtcatggtcgtggtgtgattattgagtatccatgtaaaacctgtggcggtaaaggaacagttgaccgtaagaatactattgaagtggatattccagcgggaatcgacaatggtcaacaacttagatatcaaggccaaggcgaagcaggtataaatggcggaccatatggtgatttatatattaactatcgaattaaaccatctaaagattttgagcgtcgtggccagactatttatacagaagtaccaatctcatttgctcaggctactttaggagatgaaattaacgttaagactgtgcatggtgatgtaaagctaactattccagctggtacgcaacctaataagaagtttactttgcgtggacagggtgtgccatatcttcgtggtaatggcaatggtgatcaaattactacagttaatattgttattccaaagcacattaatgataagcaaaagaaagatttgaccaactttgttcatgatggtggtggcaatattacaccacaagaaaaaggattttttgaacgcttaaaagataagtttaatatgtaaatgctaaaaaggtttctgctacttgcaacagaaaccttttttaagatcaattaattttttggtgatttttagagtttttcttggaaaatattcaatgctgaattttcaattattattctaaaaactctgcattttattgaaaatttactatgctacaatttcatcatttattctagctttgctataattaatacatagtaaagggtgaacgattttatggatttaaaaaaattaaaagactatcaaaaacacattcgaaattttgctattgtggcgcatattgaccatggtaaatcgactattgctgacagaatcttagaattaactgatacagttagtcaacgtcagcttaaaaatcagatgttagatgatatgccacttgaacgtcaacgtggtattaccattaaaatgaactcagttgaagtgaaatatcatgctgaagacggtgaagactacattttccacttaatcgatacaccaggacacgttgacttttcatatgaggtatcacgttctctagctgcctgtgaaggtgctttaatggtggttgatgcttctcaaggtgtacaggctcaaactttggctaatacttatttggcaattgatgacgatttggcaatcttgccagtaattaacaagattgacttaccatctgccgatgttcctaagactaaggaagaaattgaagaaatgttaggtttggatgcttcagaagctgccgaagtttcaggtaaaaccggtcaaggtattaaggacatgctggaaaaggtagttaaagatattccagctccgtctggtgatattactgctccattaaaagcattgattttcgactctaaatatgatgattatcgcggagtggtaatgtctgtcaaaattgaagatggatctattaaaccaggcgatcgaattcaaattatgaatactggcaaggaatatgaagtcacagaggttggtgtttctagtcctcatccaattaagaaggatattttaatcgcaggggatgtaggatatattactgctaacattaagtccgttcgagaaacacgtgttggtgacacaattactcaagctgataacccaacggctgaaccacttccaggctatcgtcaaattccaccgatggtttattctgggatgtacccagttgacaaccgtgattatgaagatttgaaggaagctttacaaaaactacagctgaatgatgcagctttagaatttgagcctgaaacttcaacagctttaggctttgggtttcgttgtggcttcttaggcttacttcatatggatgttgtacaggaaagattagagcaagaatttgaccttgatctaatcatgacagcaccatctgttgattatcatgcaattatgaatgatggaacaaccaaggtgattgataatccatctgatttgccagatgctggtgaatataaggaagttcaagaaccttatgtaaaagcggaaattatggtgccaaatgattttgttggtccagtaatggagctttgtcaacgtaagcgtggtgaattcgttaccatggattacttggataagtaccgagttaatgtaatttacaacatgccattagctgaaattatttttgatttctttgatgatttgaaatcttcgactaaaggttatgcttcacttgattatgaaattacgggttatcgtgctactgatttggttaagatcgacattttgcttaacaaggagccaattgatgcattgagttttattgctcacagatcagaagctcaagatcgtgcccgtcaaatgacttcaatgctaaaaaaactaattccacggcaaaactttgaagttgatattcagggcgcaattggagctaaaattatttctcgagctacaattaagccataccgaaaagatgttacctggaaaatccatactggtgatccagatcgtcgggctaagctgcttgaaaaacagaaacgtggtaagaagcgaatgaaagcagttggtagagttgaagtacctcaagatgctttcatggcagtcttgaagatgaacgatgatgacatcaaaggtaaataagatttgctagcattcccaacctgacgcggtttgtcgtcactctgagaatgctttttttgcttttctactgaaaatctactgaataaatatctttaaaagttcaaattatcaattgatcctttaatatctttcttttgttttttagttacgtgtgtgtaaatttccatagcagtcttagaagttttgtgcccgagaacgtactgaacatcttttggagtaattctttcattaccgtcataaagtagtgtagcaagagtatgacgcagcccgtgaggggttatcttacgtaaaggctcttttttatcgttgggatgttccttattccatttttcgcattgctttttgtcaaacttatacaagtacttcaaccaaaagtcaggctgctgtgcccaattgtagctaccgtctttggtgtgaaaaatccattcacagtggtcaccgatttcatcgcaatattcgcggtattctttcagaatcatataaagattgtctgacatagggactgcatggtgaactccatttttaacgtcatcaatggtctttttgccgttatcatctttggcgacagttcgctcaatttttacaactcgtttgtcaaagtctacatctgaccatttgagtgcaagagcttcaccacgacggcatccaagagatgcaactgtgagaaaataagtatatttcatgcggctataatcacgggctatatcaagaaaatgtttgagttcgtccaattcgtagaaattacgtgaattatctcgactagattttgctgactttttgggcatgattacgaagtcaaaagggtctttactgcaccagtgacggaagatagcatatttgataattctgtgtaactgattgacaattgacttgtaagttacatattttgaagcaagatcattaacatatttttgtacatgatccggtgatatcctgtctatgtaagtatcaccaaattctggctcagtatgatttttccatgtgtcctttaagcgtcctagtgtggaaccacgcacatcttgcttcattacttcaagccatacattatatacatagcttacagttatcttcttttgagctgtttctatcttttgacttaatgcacttggtccttgtgcctttaaattgcgacgaagttcctcggcttctttgcgggatttgagtttgcttctggtaacgtttataactttaccagtttcaggattaataccgatgtaagtcctaagtcgaaaatactttttcccgttttttaatttatactctgtaatttcagggtcttttttacgagccataatatcattcctttctaaaaatatttgatgatgcgcgctcggcacgagcgcgcatggggcgcccgcgggttagattatctcttgttgatttcatgaatcaaaagaagtaatattattaatgtcaagtttaattcgttcatgtttttcacctccaaggtggagaacaacacaagcttgcttgtgttagacttggaaggtgacaaaacatgagtgagcgggcgccccaagagctttactcaaagggatgcaccgtataagaagcgttgctgtgtcggcaatgcttcttttttgctataatgaattaaaaaaggtggtaacagtatgaacgataatgatttctttgtagtcagttacaaaattcttagctatttaaaatattgctatgaaaatgataagagagtagatccaactattttgagtgaagggatgctctcaatttcaaacaatcaattcttgaaaacactaaaaatgttaattgatcaagggtatattgacggtgtgtatgtaaagcaaactcttgatgggatgttcgttttaaacaatcgtagtaaggcagcaattactatgagtggtttagattatttgaaaaatgatcgctctatgaaagaagcatttgaacaattgggaccagtacaaaagtggttgccaatcatcaaataatttaaactgatgttctttaataccgtaaaatcaaagcctacacacctgaaagggtggcaggcttatttttatgcgtttctaaaccatctagtagatgatcctttgacaatatgagtgcctcgacctaagtcgcctcttacttcgtaataatgattattgccgaaatatctaacatcgacgtaggatcctttggcaagccagaagctaaacttaggtgctttataaagcggatatcttaacttatatacttttacgtctttggttgttttaacttcatgccaatgccacgaatgtttactgatagcttgcacgggttgtgccgtaactgctgagactgcacctgtaccaccgagcaacatgatagatgccattgctgtaactaaaaatctatgtttcatatatctatatcctccaaaatagatattgccttaggtttatagtcgctggcgttgtggactttgatataatgaatgaaaaggagataggcaaatgaaagatgacattgaaactattaaattatatgtaaaaatcatattttacgaagtcaccatcatgtttggctggtggttgtggaatattctgggaatattgccatttcactgattccagcctaactcgtgacttaaccatgctataattaatgggataactattaatgtaatcacacttcaaaagatttttttgattttgccgttaatctttgaagtgtgtttttttatataatcttgacctttatcagtaatgtaatagccggtaatagcagggtgaccgccaacgaatccctcattgatgtctactaagccttgctttttaagttttaacaccatcattacttcatcattattgccattaagtgcagcaaaagcatctttattttttagctggtgcacctcaccatcactgatagacttcaaaaattctaaaatgtcgttcatatatttcacatcctttccagccgcgcgtgcggctttttctaatattccgacagcccaccatgaggcgggttgtttttgtcgtaatttataactaagttgaatatcttgaaatcgttgtctaaaacgttgaatacgtcttgcttgtttccagattcttccgcacttagtaatgctaaacctattcgatcatcacaggcgaaaagctcgggcgactcaacatttttcaaagcttcctcagcttcactttctgtgtagtcaagatagttagttaagattcttatagtagatttatcttcaatctgctcatataaacgagcaataaggtaagttaagtatctaggtgtgtaatcatcatgcatatttatgtctccttaactatgcaatatcagcaagtaggtaataacattccttgggaattgcaaaacttctagcaaactgataaatgctggtgaagtggaattcattttcaatgcaatactgttgcaataacttgatagcaaagaagttttcttgcgcttcacctttacgattagttatgtcgttcaaattaaagtatgattcttcctcgtgtagtacatgtccgatttcatgagccagcaaaaaaggagtgtgagtaggaaaaggccatctagaattcataattattaatctgccaggttcgttatagctaactgatggagcatagggcggtaatttataagtaaactcgataccaatgtgatgatcaaaagcgtaattcattagataccgcatcaatctgtcatagtttgagcgtgtctctaatgacatttcttctatattagtcatagaatcactcatccttatttagcatttcagggtgacgcttgaagtagccctttgctatatccgcataagtgctttttaattcgtcaggtaatttgccaccgtagggcatcggcatgtccagatctgaccatgtgagagcagtgccatcttttgctgtgctttctgaactaggattatctgattttccagttaagtagtcagttgtagtttcaaataatgctgctatttgattaagcatttcataatcaggctcatgcagatcatattcccagttagagtatcgttgtgcactaacaccaagcatttgagcagttttagatttactccatccttttgagtctcttaaattctttattcgttggctaaaagtactcatatcttgcctcctatgtttcaataattaatttaattgtagtctcaattaaagaagtagtgtatatttttaaaaaatatctgtaaaaaagtattgcattttaaatttatggtgttagtataaatatgtaatcaatttacagagaaaatttaaaagtgaggtgataaagtggacgtagttagaaaagatgctggaaagatctttgaacaacttgtggcttcaaaaggaattaaaaagaccttcattgcttctaagatgggaatctctcctcagtatctaaataacattattcattttggaggatttaatgcagactttgcttttaaagctgccaaagtgctagatgttaatcctagtatttttttgaccaaaagttacagagaaaatttaaaaatcaaatagaaggtgacaagaatgaatcaattaacattattcaactttgaaaattcacaacttagagttgtgaaaattgacggtgagccatggtttgtcggtaaagatgttgctcaaattcttggatattctcaaccaagtgttgcagtttctaagaatgtgcctaccaaggataaaggtattactgaaatggaaacccctggaggaaagcaaaaagtgacaataatcagtgagccggggatgtacaagttgatctttaaatctcatgcttcaaatgctgaaagatttaatgactacgtagcaaccgaagttcttccagccattcgtaagcacggagcttatatgacggatgaaaaagcgttcgatgttgtccacaacaaagatggcttagcaagtttgttacagcaggccgcagatcagctaagagagaaggacattcaaattgaagaaatgaagcctaaagccttgtttgctgatgcggttacttcaagtaaatcaacagtgttgattggtgatctcgctaagatgattaagcaaaatggtgttcatcatcttcaaattgtcgaaaacggcacaaccaagacactaagcatggggcctaacaacttgttcaagtggatgcgtgcaaaccattacttgattgctagaaaaggttctgattacaattcaccaacacaaaggtcaatgcttctaggtctgtttgaaattaaagaaaagacgattgtccattcagacggtcatacaactatcagcaagacaccaaaagtaacaggaaaaggccaacagtactttatcaatctatttctaagtggcgaagttgcataaggtgttcgagtttatcaagcaggaaagagagcgatggacatgaagcaagacgaatggaaatcaaagccaatcatagaaataactcagaaagacgtggaaagaatgacactagatgagttaaagagaacccaagttaatttgcttattgaacggttatacgtagctagttatgatgactgatcaaaatatgcctatatgtcaggttgggttgatggtgaattaatcagacgactgggataaaaaaagagagaaaaaatgaaattcagtaaatacaaaaataagccatctcatgaagatgacttagacgaaaagatcgatagatttaataaaaaagcttactgggattatttgattccgtttttcgtaagcctaattactacactgctaacacttgcagcacttaatggaaaataagtggaagcaattttgtagtgattagagttgttgtgattgaaacaaatatcggcaaaaggatgcttttaaagagagtgttccaaaaccttgcccatctccatttgaaaaagtttaagccttcatcggtaactttaaattcagacgggtatgaatagcgagaaggcataaattcaacgagctcagcttcaactaaaagtttgaattcataactattaacttcttggtgagaagtttcatcaatactaatttgattcagcggtgctgctttttgtattttgatgtatttctttaataattttctctcggctggcaaagtctcgtatttatgcataatcattctcctaacattaaagattcgatatttatttcattgtatcaaaaggaggagtgagcaaaatgacagaagacaagatttttgatgaatttaaccaattgattaaggacttaaccgacgacttgatcagagatacagatgatccatattcggattcagttgatacagctttgacaaaagtaattagtgcaagaagaagctataaatggaaaaaagccaacgatcaaagaatcgctgacttcaaaaaacagaatcctaatgaggatcccggaaatgcaaaagtagaaatttcgtctgaatattgatgagattaaaaaatatctcgatcaactttcatgtcagtataggcatctgaattgatgcggaagttctttctcaattcacagacaaagaatgaatcattcttatctaaaactgatgaaaagcactctctaatttttgcaggactaagagtagtttttaccagccaaacagatttttgaatttcaacattgtcgttgccagaaattgtagaaattacttcctgaacattttcatacttttgcccaggtttcattagatcgtaggcaataacatatgatgccatgatatcccctccttattagaggatgacttaattttagcagaaagaaggaatagcaatgcaagaattaattaaagttacagtccaaaatgatcagcaacttgttagtgcaagagatttacatgaaggtctgggacttaaaaagaagtttacagattggtggaaacaaaacagcaaagactttgagaaaaatgtcgattatacatattcacctaaaagtgcacatgttggaaatggcggtacaaggcaaattgatgactacgccttaacaattgatatggcaaaacaactttgcttaatgagccgcactgaaaaaggtaagcaataccgcaagtatttaattgaagttgaacgcaagtggaatgatccacaagagatcgtcaaacgtggttacgcaattcttcaaaatgaaaacacacaactgaaattggagaacaagaacttaactatccagttggaggaatccaataagaaggctagttacttagatgtgattcttggagcaccagacgcactagcagttacgcaaattgcggcggattacggttacaacgctaaggattttaacgaactgcttcataaagtaagaattcagcataaagttaacggtcaatggattctatataaggtttacatgggtcaaggctatgtaacaactaagccgtttacctttatagatcataaaggcagaaccagatcaaagccatcaacgtattggacgcaaaaaggcagaaagctaatctatgacattttaaaagataacgacattctgcctttaattgagcgcagtgacatcgaataaggcaggtgaagcaaatgaagttaaataaaaaaacaaggcttgtaatgcttacgagatggtatcgcaaggctacaagcctgtatgaaaaagaactgctattaaaacttattcgtttttaccagtccaattgacaaaggagactaaaacgtaatgaaaaaagaaaagattttcactgaacaacaaattgaagtaattaaagaaattgttagagatgaaatcaaaaaagctgacaagcagcgcttatcagctttgggtcaagaacttaactttaatcctgatgattattaataaactcagtgcttttatcagttagtttaaaccaagtgaatccacaatcggtgcaacgaattaaatttacgtacagtgatccgccaataagattgtcttttctcattacaactaaggcaaaagttgttggacctttgccaattgcaatggcttaacatttactgattggcattcaggacaatgcagtttattcattaaaatcacctcctttattggagatgactcaattgtaacagaaagcaggtgaggtatatggctcttctgagcattaacgaagaagaattagaaagatttattgctaagcgagttcgtgaaggtgtcagagaagagctagcaaagcgcggagaaattaccgatcaaaaaatgttcagccgcaaagatgcatatcactatcttggtgtaagtggctcgtactttgataacgcggtaaagcggggatttatcaatccgagcctgccaggtgacggcagaacgagatattacttgcgcgaagacctggataggttcgcggaagacgggaaagactatttaaagaaagcaaaactttaaggagaaaaagaaatgaacaaagatactgaattttcaaaagaaaagatggccaagcaagttgcaaagttgtttagcaaggttgatgaagacagcgcaattattatgtgcgtcgcaaatggaagcaatttaagtgaattagaatatggcaatccgttcgttttagggggggtaatccagcatctaactgacgaaatgcgtgagcagattgaaaaactgcctaagtatgaagccgctccattgatgatggacgctctaatgaaaggattaaaagggctacaagatgactaaaaaggaatattaaagagaatacggcaagacaaagcttgaccacgtgctaagccatatgaccattgcattcggtaaaatcctggaattcatggcaattctatttttaccatttgcaattgtagagcagctatgcatctacggcgtaacgcatcccgaccaaatcatttcactgctgctagtcttgatgatcattctcacagcgctgtcggtgcgtgccgttaaaaagctaagaaagaagtgatgacaatgcaggctaaactttttggtaagcggttgatgcgtgctagaaaaaataggcaacttacacaagtgcagctggctgaaaggattggcgcaagtacaacgactatcagccggtatgaaaatggtttgtcttttcccagcaagagaagacttagcgagattgctcattttctgggcgtaaaagttgactggctattaacaggatttaaggaggactaatgaagttatggtacaagttcatcaattcggtgtggcgtatcaacgagccggtaagtacagcgagagccagcttatccttatggctaacagtaacgctattagcggcgttagcggttctgattttgcgactatgccagtagaagttaaaaagattttaggtattaaaaaagcactcattgagtagcagtcaatgagtaccagacaaaataaatcaaactaaaggaagtataacacatggatacatataagttaagagacattggtgcaactgttaacacctttggagacgaatatcacacgttcagtgatgttctaaacgacatgattaagattgaccctagattggatattagcgacgtacaggacctcgtagacacactaggggggtataaagatttcgaagaaagcgcaaaagagctttgcatgaaaaaactcaatggcgtggacgaggacgaagaagaccccgaagccgaatggggcgacggcatgtatgaccgtgccgcaggaaagtaggtggcagttatgcatgatgcacaagagtggctagacgggatcatcgaagatatccctaatatccgcaaagagatgctggacgactgtcgcactatgaagacctatggtaaggcaaaacagtacgctaaacagttcaaaattgactttgagggtaattataaggctacggcagaagaacaagcacagagcttatttaacggccttatagaggacgtagtaacagaactcaatcgagaatccgacagaggagagattaaacatgactgaggcagagaaatttgcagagatgaccaaggatgaactaattaagattcttgatcggttgcaagatgaaaagaaagaacaagccaaaaaagacaacgctagcgtttatgagcgtctttcaaaggtagatgtttctaagtttgttgataaaaagaatggtcttaattatctaagctgggcgaaagcctgggggctggtaaagagtatttttcccgatgctagttataagttacgggaatacccatattacacacaaacagcagacggtaattatcagcagattggcacccatgattatcttcgtactgagtacggtgttgaggttgaagctagcgtaactattaaaggcgagacatatagttcaaagctttatgtcatggactttcacaatagagcgcttgaccctaaaaaggtcacttactttgaaattaataaaacgcaaatgagggcgttaaccaaggcgttagcatttgcggggctgggtttgaacatttacgctggtgaagatttaccaagtagtgacgaaaagacgccacaacgcaaagaaagagtgaccgagcaagaactaattgaaaaagcaagaaagagcaaaactcagtacggtggtggcaatgaattagttaccgacattgtgggacttgaaatcgatggagacaagcaagcaaatgcttttttaaaccagtggtgtgaaaaagatcagaagaacaaaaatttatataaattcattattaagaatcagttagctacacacggtatgaaggtaggagcataaatatgagtgaaaaacaagtatttgaaggttcaagagctttcttgatgattccaccagctattgcaagagataaagagcttttaaaaaagccaaaaacaattattttgatgggtgaaattatctcaatgctcaatgttaccggcgaattttttatgagtaacaagaaaatagctgaaaggcttgatgtatcagcccgtaccgttaacgaatatttaggaatcttagagtcaaaaaagttaattgaaagaactaagataattagtcaagaaaacggcgcaattgtgggtagacaaatacgtgctggcgtagacctagtgaagcgggcttcactagggtggggaaatacgcttcatgggggtagtgaaacccacttcacccccctagtgaagcccacttcacataaatataacagtaataatagaacaactaatagaacagtagaagatacatatagttctgctgacgcagaaccacctatcccttacaaagaaattattgattatctcaataaaaaaactaatcagcatctacgctatcaaaccaaagcttatcagaaattaattagacaacggtttgaggaaggtgcaacgctagaagacttcaaaaaggctattgataaccaagcatatgcgtggcagggaacaaagttctggaagtacatgcgcccgtctacactgtttcgagcatctaagtttgattcttatgtgaatgctaatgacttaaatcaagcgaaacagccgtctaatggcggctacggtggcgagccaaatataagtgacattccagacgatgatttaccgttttaaaggtggtgataatgatgcaaggactagaaggaattgcaattaaaaccgaaaaagcagaccaagtatgtccaattcataaaactcaaatggtgctagaccgcaaaggcaagccattttgtattgaatgtatgaaagaacaaactgaaaaagaaaagaatgaccaagttaaacgctttatgcatgacaaggtcactaagattttacgtactagaagcttggtagatagaccagaggacttagaaaagtctttggaaaattacacggctaaaaaaggatcacaagaggcttcaatgggtaatgctgcttataaaattgcccatgaactaattgataaccctgataaagccatgacaacgttgatgtatggcacgccaggcgagggaaagagccatttagcaatgtcaatccttaatatcgtaaatgctaagagcaatccaccacaaacttgcctatttatagacgttagtaagatgtttgacatgatttatgaatctatggaagatccaatgagctggtggactaaaaagaatgctattaactttttgggtagtgtaaatgttctagtgattgatgatctgggcagtgaatcatctatgcgacagaatgaggcaacagaagcaactgaatttaaacaggacgtattaaaacagattcttgataagcaaaagaggctaatcgtcacaactaatttaacgcttaaagagttgcaacaagcatataaccctaaaattgttagtcgcttgttatcggattcacgtggtagacgtttagattttacaggaatttcagataaaagattggagctataacacatgattaaaattattgaaaatgcagaagaaaagagaaatgaatcattgaagttgcaagttggcgatacgctttgctgttggaatgacaaggatgtgctgttcaacgttgataaaaactatttaatggtcactaaggtaactgacttttcagatttagaaaagccttatacactcactgcacttaataccactgatgagcaacatagtgcaactaatgaaaactacgtactatatttttattcggatcttgacaatttagcccgagatatagcggacagctacgatcatataaaaaaggtggatctagtggcaacagataacgatgacgaagattaaggtagtacagccaccatgtgagtactgtgactttaaaaacatgaatcgagccgcatatgcatttagagaaaagaatggcaggtttggtggcttcttgtcgctaaataatgatggatcctttgacatcaatcgagggatgtataagacagaaaagaaaccgaatttttgcccgaattgcggtagagatttaaggaaagacgctacacaagataaagataagtaattgagaggatagacaaaatgagtaaatttaacgaagccagagccaaaaacattgaagatttaaaaaaggtcgttaagggagaataacgatgaatgacttactagctatgtgccgtatgctaaggttatcggcttgatgccccgggtattaatttcacaaatcgacaagaattgtttgatttgctgacagagatgaaggtgaagatttatgaactgtaaaagattaaccggacatggacaagatgaaatgatgttccattgtgatagttgcggagtaaatatatcgatagacacttacgatgttttaacggcagaagacaacttgcattgtcctctttgtggcgcaagcgccggtcatttatccgtctatatgtttgatgaaaagaaactaaagaaaattgatggcgactttaatgtgaaaattgaaggggataggatttgcatttatctttgtgcagttcgcttatatgaattatatggcgaggataacatggctatttatagcgtttatttaaaagtggagaaaatggctaagactgtggaggcaattttggacttttcacggaaattggatcatttaaaggagctatacaaaaatgaaactatttaatgacttgaaaaagctgtattgcagtccggacgaactagaagtaggcgacttcctctattgctggataactaacacccattatcgtgttttgagtgttaacggatcaagctacgtgactattgagtgcgttgagaccggatggacaacaccagtagtgcccacaattgataacgcattagaagatattttggctcacaatgcagactttgacctaaagcatttgacaaaagttaaacctaacgaagtttacatgatttttagcagaaagtgagggattacatggcagtagtaaacgaagtaatgacaataattaatgtgattatgtcatttgcattagtgattttaatttttatctccatacgtcagaatataagattctcacgtgcaaccaatgcaagccttgacattctgtttaaaaggcaacagctcctgtcggaagacttggatcagcttcaaaaagcattaattcaagtccagaaaggtgaagtagctaacgctaaatctatcaatgccatagcaaggcaaatgactgagttgcatgaccttgttattgaagatcagacaagacaagaccaggacatcaaggcgctggcaacgcttataagcggcttgaaaacgtccagctatcgaagcagaaatgataagcattttaacaatgctttaaagaggattgcaaagctggtgaaagaatgacggttaattgcatcaagtttgtaatacctggtgagccacaaagcaaggaacgcccgcggacagttcgtagagctggcggtgttagaacttatacaccagcaaaaacgcaccgatatgaggatattgtgagatattttgcagtttacgccagaaaagaacacaagataagtgagccaatcaactcacagtgtggcgtgtccataaaagcctatttcggtatccctaagagcttttctaaaaagcgtagggaattatgcttaaaaggcaaagaacgccccacaaagaagccagatagcgacaacatcgcaaaaataatctttgatgggatgaacccaaagatgaaattaaacaaagcgctacacaaaaaaatggtgctgcaagatggattttatgaagacgataaattaattgttacgcatagcgtggagaaatggtattcaatgcatccccatgttgaggtaacagttacatgggaagattaatggcggagtgatatacgaatggcagatagagcagagcaaatgacgctagatgataatttagaggttgattcaaaggcaaccgcaaacaacgtgaggaattttcttacatttaaatttgaacattttcaaaattatgcaggtttaaatgtttctgatctgtctgttattgatgattcacacctatctagccccaaaatggacgcgtcaggcgtttcttcacatggtgggataaatcatactgagtcaagttttaaccgcatcatggaagcagaacaagcatgtaaagcaatctataaaactataaaaaattgtagaaatggcggcagaactccatatcaaaaaatcttgtctgaggcttacttgcaaaacatggaagattacaagattcagcaggaactaggctatgaagatagtcagtactacatcaaaaagcgccaagctttgtgtgaatttgctgacagattcgaaaaatggaaagactggtatagcatcccctactttaaagatcttcacatttaccgaaaaaataaaaacggagtttaaacggacttttatcggagtacaagcggagtgaaatggctatattatagtattgtcgaaaatttaggaagcagggttttcgatgaagtgtaggtacaatgacaatttgtttttctgttacgagtcttaataaaccatatatttattaaaaaactccaattaaccagtaacggcggctggcgccctagaccaggttcgattcctgatgctgttgtagcccgtttattcgggcggaatggcaattctaattccatatcccaaattttataatcactttgcctcattcgaggcattatgagctagcattcggtgtaatgccacatacgttttatataattgcctggtgtggtgaggttcaactcctcactagctcttagccggcgtggaaaaccggcactaagtataataatcatatttattaattgcataagtaataaattgaattttactcgtctagtttgggactgtgtcccagaggtcaaagcagtagtgttgaggcacgttaaatttaagtcattaacaatttcaacttggtgcttttgagtttttaacttgaaaatgttgcaagcaccaagaaccatagatatggtatatcactgaccaagttggtcacgtgtgggggttggattccctcactgcttatatgaggaagcgtgtgtataaacctatgacagggttcacgccattcaatctataaatcgacagcgacgttctgccgggataccgacggaatttcagacaagccaaagggtaatagctttggttgacctacaccgaaaaggaaataggtgtcgttggttgagtgagaaagcattaaattattgataaagtaggcaacaatgtcagcagaattacaattgccggcggagatttaggcgctccgtgtaaagcagtctcacgctaatctggcagacatgtcagggaaccacgagataaatgtaagttaaaattctggtccacgatgatccgcagaaatgcgggtataactgatacgtgccgtacgagtagcccaaaacgtggaaattacaatacaggtttttgcataaccatcaatcgcattgttgggtgaaagttggaggataaatcctcaccaagatttaaattaagcaagagatataaggtcgctccttatattgcgacttgcttaaacttgtgactgaataatcaacgatttaacaagttcaagtggttaatagccacccgcataactaggaatatagccaaaacggtaaggcaacgggctttggtcccgtaatttgttggttcgagtccagctattcctatcgtcggttcgaagctagcgacgtataaaataaagcaattatgtgaggcaataaccggtcttacataaatggttaagttagtcacgcacaggcgtgcaaatggtttgttagtccagaggtctagggcaccgcactgtctatgcggaaacgtcggttcgatttcggcacagaccgttgaggttagttctgtgaacaaagtcggtggaggacgtctgcattccgacataaagcagagaagactaagagtcacggaatcgtaaaagaggaaaagcttaatgcaagcatcttgcctcatttgatcaggtagggagttagctcagatggtagagcgttgcaaggatcgtgggttcgagccccacactccctattgggctgcaaaagctcaaatatatgctctttttgaagttcaaaatttattcatttctaacccttctaactgttatccatatagttagaaaactacagtcgtactgtggcttttagactcattgctaagcggcaagcggctggtctccaaaaccagtaatctaggttcgaatcctagtgagtctgtttcaatttaataagcatttaagacattccacgctatgtgtgatgtctttttttgtttccagggagtaaaaatgtatcacaaaaaaccagataagccagacaaatcgctagccaagtgggttgaagaaaagaacagcaaggctacaccaaaaagaagcggtttttggcacgaatcgaaatatcgcccaccagaggacgacatcaaagaagctgaaatcaagcaagatgaaccagaattaatcattcctataccgaaatcagtagtaccaagtattgaggactacgaaagcacgtttttgcataaggaggatcaagaaagtatgcaaaataagacattagtcagcaagttaactgatgaaagacaacacttacaagatgatttattaaagattgataacaagattatcaatccgctaggcgtgtcagactatcaggttaaattgtggaagatccagcgtaatgcgatgatgaccgtggtcaacgtcttagacatgcgtatcagcgatttaagcgtggagggcgattaattgaccccagaaaagtattacgagcttagaaagcattataagctggtcaaagaagctgaacatttagttaagtacaataccagcaacaaggtagtagacatgattaaatttgtggcgtttaaacaaaaagcgggcatgatgccacaagagtacatagaaaagtatggagattcatggaaggactaagacacccgctgacacaagaaaataagaccataggtgaggccgtggcacataaacatagaagataccgcggcgttaaaaatccgcttagagggtcattattagagcgcagaatacaacgcgccatttattgtgttgaaaatgacgtagataaagaatttattgattggtttgtcgctgatacagggatgcaaccacaagaattcttagacaaatggagtaaaaaattaggcatatgaaaaaattgaagaggatgctacggaataggcatattagcaaattttgtagtgtgattttagaagatttagagagggcctaaaaaatggggctattcgttgtcttatggttccggtaatttggaaaaagcaaaattttctcgttttaaagacctttcttcaaatttgaatgaccgatatgagaaaagctttaattctgctgttcaagaatataaggactacttaaaaagaaagtaggtatattcatgggtggtagatcgagttcttttaagtcaactaaaaccggtgcttcatatgtccgccttcgtaatcaggctaggcaggcagctacgaaagcttttgataataatgaaaatattcataaaaaatttggtgaaattgaagtaaagcgtgttagcaaaaacagaatattagttaaaggaagaaatggacaaatttctacggttgtgcctgactggaatatgacaaaagacaatatggagacaaatcctcgctttaaaaaggctgcttttgtaaatcattacatgagtgaagaggatattaattacttgcttcccaagtaagttaaaaataagttaagagatcaattactggtggaagaaacgactcgtttagcagaaaaacaggtgcatccctgaattaaagctttttggctctggcgaaactaagatcatataacaaataaaggctattcacctcccgtaattaaatgaggaggtgaatagccttgtcagaaattattcttactttgatcattatacttctgataattgttgcgatcaagtcgtaacgccagagccaagggcgctcgcccttgtgcggtcgagcgccgctaataatataaaagtattgaattgaatataaatatgcgttgctgagagatgacgcttattttttatgcaaaaaatcttttcaattataaaaagttagatggaaacattactcaattcctaatttagctttaataccatctgctaggatggctgaaaaattaagccctgcctctttaccttcttcatttaaatagttagggatggttaaggtctttttgactacacggttatcattttttcgcttatattccgaaatattaacagtaaccaaagtagcaatttcattgtttttggttttaggaattttagcatttgattcaggtaaatcttctaccagtgacatggttccgattaaatctttccccatatcaattgcttctgcaatagttcttccttgggtatcacggtcaaggtctggaacattgaccgtatatttgattttagggtcatcagttggagttataacgattggaaatacaacaattttatcttttttcataattaacaatttaagatggtacacgaataaggggtattgccccttattttaccctttaagattatttcgcttcataatcttttcccaagtgactttgttaagatcaccgtggcgaggaattgattctgaatgatgaccgttggtataaatatcatgattatgaccatgacggtcgaaccaccagccattttcctttaaaactttaagggcatctcttctttttaccatcttatttctcctttcacatattataatacacgtgtttaatacgtatgtcaatataaaatgcagattagtttaatttttttaggaggtgaagctagttttggcagagcagaagttaacaattaaacaaaagaagttcgccgatgaatatgtcaagactggcaacgccacagatgccgctattaaggcaggatacagcgaaaaatatgctcacaccaatgctaataaattactacaaaatactacaatcaaagcccgtattgacgctcaaatgcaaaagctcgaagacgacaagattatgaaagctgatgaggctttacggttgatcacagcaattgcacgtggtgaagagactacgacagttgaaacccaagagggatatgagctgacggtgtatccaaccatcaccgagaagcagagagccagtgaggcaatccttaagcgttacccactaagtccacttgacaaagcacaaatcaagaaggcacaggctgacgctgtcaaggcagaagcagaagccaacttggcaaaggcacaggcggaacaactccacactgttgctgataagacgcgtgagaagatggacaagttaagcactgaggagttacgcaatttagcaaagttagcaggtgaaaaagatgattaagctaacagccgctgaaaagaatggcattgcattagccgctaaggaatcgctagcacgtagaagttacgcagactatttcttgctagccaatcctgaaatgaagctatatccacataccaagctaatcactgaaaagctccaaaagatagcagacggtgaacagcatttctatatcatatctatgccgccacaacatggaaaaagcttaactataacgaaaacttttccaagctattacttgatgaaatatccggacaagcacgccatgatagtcgcttactcacaagacttatatagtcagtttgcggcaagcaacaggcgtgctttttctgattggtcgggtccgttgttcaacctcaaaacaggcaagaatacagcccaaacattcaccgtacaggaccacagaggcggcttctatgctacttctgttcttggcggtgctactggtatgagtgccgacttgctggttattgatgaccctgtaaagaacgcagaagaagcgcactctatgaccgtcaaggacaagatatgggacgaatggaatttaacgttttacccacgtctgcaaaaaggcggctcggttatcgtaattatgaccagatggcagacagacgacctagcagggcgcttgctatctgagtcatccctaccatgggaagaaatcaaattgccagccattgcggaggacatcccagcagggacaacagacgcaattggacgtaagaacggcgagcctctgtgcccgcaattgcacatgttagatgaattacttactcacaagcacgacatggggacggtcaagtttacggctctttaccagcaaagcccaattattgagggcggtaacatcttcaaagatgaatgggtaaagtactacgtggacagccgcgaaaccatggcaaggctgggactaaccgaaaaagatgttgctattttgccccgtcacttagatcaaactgttcaagcatgggatgcaactttcaagagtaaagctaatgacgactttgtagcaggtcaagtatggtcacgtcgtgatgcaagctattttctacgccctaattggtgccataagcgattgagttttacagaaacgctagacgctattagagccatgtcccgcatgtatcctgacgctactgtaaagctagtggaggacaaggcaaacggtccggcaatcattgacacgcttagacgtgagattccaggaattatgccggtgtcaccaggcgcagacagcaaggaagcacgtgcggcgtcagtgtctccaatgtgggaagctggacaggtttatataccgcatcctgcatggcacccagaagttaaagactggattgctgaaattctaggcttcccaaatatgccgcacgatgacaacgtggactcgatggtttacgcattacggcggcttaacaccaagttcggtggtccaatcgttagatattaggaaggaggacgttaatggcaaaaaagagaataaggcacttcaaaacgccagttgtgcggtctgattcgcttgacctaagtcctacggttgactatgagtcgattgcatggaagacagctgatcactcacagaactatgaagccttagacgatcgatacaagtatgatgctatcgctcataagatggtctcaaaggttgcagaagacgccacaagaaacggattccgtttagttattccaggcaagccagatttacaagagatgtatcaaaaccgcttaaatgacttaaaaacgcaacaggttttatctcagcaaatcatctatcaacgcaaacacggagatggctatataacttacctagttaaagagacaaatccaacgagtacatttgaccctcttgaccctgaaaacatcgagaatgtggtagcattgcacgcattcggtcaaaagaatgtacaaagctatctaaccgacgatgatccaacgagtgacgactacggcaaagagtcaaaattgaagattcaaccaaaacaagccgccaccacattagacaggtacggtaatccaacacaagaaaccaaggacgaaaatgcgattgttcttgatgctaccaggtatagtcacatcagcttagacaagtttgacgatgaccaaacagggacatcaattatcaagcgctgtgaaaagcaactcaataatatggcgattgctaccgaatcagtgggtaaaatgctacgagaatttacgtttaaggtcttccaatctgataggctgatgaatgaaccattagaccagttcagacgcgacagagacgaattagcacgcgtagcaaacaccgaagctatgatgtttactggtaacgatgacaccgtgaccaagctagcaacgccaactggtggcatgaatgtcttacttgattacttgtggcaagacctttcaacagcgtcaaacatccctaaatcggttttgacgggtgaacagtctggcacgctggcaggcgcagggcaagacgtgcaaaactattatgacagtgtgaaagccttacaagagcagattttgaagcccgaaatcatgaatattgtccgcttgttgatgtattcgaaagaatttggcggttacttagacccagacagcttagaatggcacattgagtttaatccgctatggacaccggacgacaagacgcaaagcgagacactggtcaaccatgcaaatgcggccggaacactggtcacaaacggtatttttgcccctgatgaagtccgcaacatgttcaacgggcaaggcaacaacgcaattcaagggatgcagaacaacgcaaacgtgactgacagcgccgacaatatcgaagctcgatatacgcaagagcaaattgaccagtactacaaagatgttgaaaaggctggtatagatggcaaggcgtagaaatggctacccattgaagattgaacggtcgtattaccgaggattagccaaactcattcgagaatggcaaaaaatagctttcagagtggctgacgcgcaattaaggcattatcttattaacggtactaaaatgctcacagatgcggataattcgcgtaatccagagtggactaattacgtacagcaaaccttgaatttgatgtctgttgatatggaaaacacggtcacagatcaaatcttgcatgacatgactatgcggtttgtttatgcggttaaccagttcagtgctaataagacgcgtgtgcatcaagctaatgtgcagatgaagatgggaccttatgcgttaaatccgttaagagataacgcaaaattgcgcgaatatacctggggtaagatcttagaaaatacgaacttgatcaaaaccatgcaagggcgctatattgaccagctgaaaggcgacatttaccgcattgtcaatgatggtggcggtcttactgatataagccacgctatcagcaatcgaactggtatggctttgcgtcatgctgacctaattgcaactgatcagacaggcaaaatactagcccagattgacgcttaccggaacaaacaggcaggctcaacgcgctatatttggcgttcaatggaggacaaacgggtaagactaaaacacagagagttagacggcaaggaatttaagtatgatgaccccaacggcggggataatgggcagctacctggcgagccgataaggtgcaggtgttacgctgacccgattgactaaaaattaaatgaaacacaaacgcttcctcaatgcgagggagcgcttttttcatgcccaaaattagcaaactttgtgaaatttttaagtattccgcccgtgggtgaatctcatttaagcccgttaaatcaacattcttactttgtgaaattttaggaggattttatggaagattcaaacgaaattaaaccagtttcaaccaatttaaccaatgaagaaactaagcaagcaattaatgctttgaagcctaaaagcgtggaggtagctccaaaggtagaaaagccaattgaagttgtcaaaccaacaccagtagcaaaggaggtgaagccaatggcagaagtaaaagaccctagagggatgttcgattatacaggctgcgaacagtacaccgtgcaagatggcgaaacattgtttgatgttgctcaaaagtacaaggtcgctttgcaacagttgcgttatttcaaccatgtaccaaaggacaccatgcgagttaagcctaggcaaacactgtacatccccaaagaaccggtattagtgccagtaggcgaatagcatgaacctgacacggtacgatacagcgacgattaacaagttttctgctgattcacaaacaggattcttgcatgtaagcaatgtgccaatcgcacgtgtgggcgtttttccttatatcggtaaaagtgggcagatcaccatggaagccaaacttcctgatgatttattgactgattcggctgttgagagtgcaaattcaaagccagttacagacgatcacccacaagaatcggtgaacgtgaccaatacgaaccgatatatgaagggattaaccgccaataatgcccatgttgatggtgacaagctgaaagttgacatgactatcaccgattcggcattaatcaaagaaattcagggcggcaagcaagagctttcaattggatttcaaactgatgtggtacccgttaaaggtactttcaagggtatggcgtacgattcggcacaaaagaacattcaaattaatcacgtcgcagtagttaaacgtggtcgtgctggtcattcggtgagattaaccggtgacagtgcagaaatggttatagatgattcacaagagaaaggaacatcaatggaaactacaaaaattcgtttagatggtgcagatgtcacagtcgcaaccacagacgcagaaagaattttaaagcttgatgctgacaacaaggctaataactcaaaaattgccaaacttgacgctcaaattaaggctttgacagccgaacgcgacaagttaaagggtggtgctgatgctaacaagaaatcacttgatgaagcacaagccaaggctgattctcttgaaaaggaattagccgcagaaaagaaaaagtttgaaggggatgcactagatcaagcaatcgctgaccgtatggcacttatcgatgaagtaaagccatatgttggcgattcttttgattttaaaggcaaatctccgaaagaaatgaagctagaagctatcagcaagactgattcagtcgatttaagcgctaagtcagatgactatattgacgcttattttgactcaatcaagaaccgcaataactctggcgtagttggttacacgggtattgaaaccaatgtcaagacagacagcgtagacaataaacccgcaaaagaccgttaccacttagcctaaggaggtaattaaatggcaattccagatggagaactttacaacaccggtgaacttgcaccaggtcaattagcaaccattgaacgcgcaacaatcaacaccgaacaagcaggagcaccaatcggcttcggtcaaggtgtcgcaattaaagatggtttggtagttccagcaaccggcggaaatattttcggcgtggctttacgcagaacttacttaaacgctgactacttaatacaagaaaacattgatgctgacaagtggcaaaccggtgaattatttggcgtagctcgtgagggaactattcaagtaccaatcaatgaagatgtaaatgaaaacgagaatgcagccgttgataaggacggcaatttcaaaccagcaggcgctaacgatacagtcgttggcgtctttttaggttccggcaataagggcggtaccgcacgcatgcaaacccgtatccagctttctaatacggctgttacaggttcaggtttgcaaaatgctaacgcgccacaagttgaccaacctagcacaccagcagttaacccaacgccagcaacaaagccagcatccccatcaacgggttcaacaactggcacagataacaagaacggaggtaaataatggcgaataaggactatttaacgcgtgaacagcttacctatgttgacaacgttattaagactccaaaggaacgagaattaacagctatgtcactgttccatactttcagcgttccagcatggactaagcaaaccacatacaaggtaatgactaccgctggtcaagccgctcattatgttgacggtgccgacgatatcccagtagttgacatgaatgtaaccgaatcagcatccaacttgactgatattgcgattgcggttagatactcacgtcaacaacttggtgaagctcaacaagtaggcatggacatcttaacgccaatggcaacaagagcccgtagagcactagcagaagccgaaaacaagcttatttttaatgggcttcacaattccaatccagcacttaacattaacggtttgactgatccagtttctaagttaggtgtgcaagaatcaaccgcaccggttacatttgatgcacttgctgacgacccagacaacaatttaaagattagaaactggctcaaagacgcaaaaagcaagattacacacttggctggctattcaaatgctcaaccaattttagccttgccacaaagcgcaattgatcagcttgacatgccttataaccaatacaacccacaaatgactgtattgcaaatgattggaccgtggtttaaggacattaaggcagttcctgaacttgaacaccaaaactttggctctaatggcaataaacaagatatgggttatatcttcttgaatgacgcggacattgtacaaattccagtggctcaacaagtacaacaattgcaacaagaataccactcaggacgtaccacaattccttacactgaacgtcttggtggtcttgtaatgtactacccacacgcatttgtacaattgcacggtatcaacgatccaaagaaagcctagttcggaggtagcctatggacgatttacaagacatgcttaatgctgtgaagcaattaagcccagatttaacttctaaactgtccgatgatgcactaaatgggctattgactaatgcttatcaaatagcaatggctgatggttttccaaagcttgccaagaacaacgatggtgagactatcaaagctcgtgacatggctacgcaatacttagccttgcatttaatcacgattaacaaggctatgggcgatggtggcgccaacgttaccagcgaacaagtttcagtattgaagcgaacttatgctgacgttagcaaattaaatctgttccaacgttcgccgtgggggcagctatatttatggctgtataacctttatggcaacggaagcattacaagatatggattggtgcaacactaatggctgacagctttgaagaaatcgaaaataggctagatcatatcacgaaagaaatggactatttaaaccatcatcaggtagtaattggcttttttagtgatgaaaatagcttgcttttgacgatcgtaagagccaacgagtatggggcacacattcgccctaaaaacgccagcggcttcttatggattccgtcaaggcaggctattaaagagttcggaaagaacgttactgcaaaagacgttagaaataagtatcaattgttcatccctaagggcaagcacattgcggctgtcaatcaagacggcaaattggttacatatttctatctgatgcaaaaagtagacattccagctcgtgcttttatcagaaaaaccggcatagattaccgtcaaaaataccgccgatacatcaaggcaggtattgaagagattatgtatgatggcaaaactggtaaagacttgcttgaaaagctgggacgcatgggcgtaagtgatatgagagaagtaatgagacgttggacaaagccaggtaacgcaccgctgaccatcgataacaagcgtggggctaataaccccttggttgacactggacagcttcaaaaacgcattacttggaaaatactgccaatgacagggggcacgctatgagtttctacattccgtttgcggatatgctggacagttttggagtagatttaacggtttacccatatgacagcccagcaaaaaaagctcactttcactacgtgggcggtgtaagagttgaagacgatgacgcgccaaaggtgcagccggaacagcgatatgaaccggttgtaccgaataacgcacaaaattctttcatggctcaattttatacgggtggtgagatggcgcaggcagatctcttatggatcagctctaagctttatcccacgaactcggtcgtagaagtgccgtctcagccaggtcaaaaatatcgaattactggcaattccaactttcaaggctattctgacgttgtcatttacgcattaaagggagatgataagcaccctaatggctagcaatttaccggtattgagtgatcattttttagtgcagtacatacttggcaagctggtcaatcaggtcacgggatgcgaattggttgaagatgcaaacattgacgaaatggaggattatccgtttttcactttcaaatggattgactttgaccaagagccaaacgccgactggctaggcaagcatagacagtatatctgcactatgcagattgattgtcactcaaattcgagcgtacaagctatgagccttgctagaaagctgtttgaagcactccacgaagtgccgtatcgcaggttttttaagcaagcgtacatagtacctcaaagcattggtaacacgggcgatagaaccactttacagggcattaattatgatcacgattttggttttgattgctctttcaccgttactggtggctttgagtttttagaaaaagacctcaactttaatgtcgaggattacacaattgaatcaattaaaggcacatcaagcgttgtcggcagtgataccgacggcgcttttaatgtgtccaaaaataaggaggaaatttaatggcagatgctaagacaaccactgtcgttgcaccttatgaccgtgtcagcgacgtaaacgtggttatttcagttttacacccacgtccagtagttgggctgggtaatcttttaatcctaaatgctgtcactgcaaaggctccaacgccagcgcaatcagatggcaaagacggtaagagcaccgatgctaacgcacaaactacgccagcaactaccttgccagatcaattaagcgtacaagaccgcatgaacggaatcctattacgcaagactgacaaggcaactggcgcaatttaccgcgaatacaagaacattgacgcggttgcggttgattacggtgaagacaccgcagtttataagaaggcacaaacctactttgcacaatctaaccactccgaccgtgtggcagttttggactatgacccatcaaaggcatacgacgctttgaaggctttctggtactttaactggacctttgcagttcgcacatctaatgacgttgacgacaacttagttgctctgtcaaacattttcgaagccaacaagaaccacattttagtagttcaaagcaacgatgtgactcaatttgacaagatttacggtcaaaattacaccgttggcttgaagcatgacaccgctgaaaacatggacagtgctctcgttggggcagttgctaccttgaccgttggttctgtgacctggaagttcaagcaattaaagggtgtaaccccagaagtcttgacctcaaatgaattgtccgcaatccatagagcacatgcattcgcatatgtggaagttagtggtgttggtgaaacatcagaaggctggactatgtccggtgaatacattgacgtcattcacggcattatctgggtcaacaccaacatggaaaacaagttagagcaattcttgcaagaaaatggcaaggtctcatacgaccaagttggaattactcgaatcaatggtgttgctacgcaagttatggaacaagcctatgcgcaaggaatcatcttaaccgatgaaaccactggtaagggtgattacaccgtaactacttcacaacgtagtgaacaatcacaacaagacttgtctgaccggcattacggtggtttgagtttcacttaccacgtttctggcgcaattcacaccattaccgtacacggtgaagttcaatcagacacgattttaaactagaaaggatttattagatggcagctcataacaacgcacaaacggggttgatgggcacctacgacgccaataatgtttacttcactattgacggtaagactgcttatggctatggtgcaacaacccttttcactttttcatacgataacgatttgttatcagttcaacaagaccctcaaggaacaggtaccgcaagtattaacaacaaaactggcggtacctttactttaaccatcaatcaaatgtcaccatttaacaagatcattgatgatttagccgatgaacgtcgtgtcggtggttatgcggttgatgcttgtgatggttcacgtcactatgtgggggcacacgcatatatccaaaagaagcctgacggtggtgccgcaaacgaagccggtgaaagaaccatcactgttaaggtcttaaacgttgtagaaaattcagttctttaattaaagcgaggtaaaaatttatggacaacactactaacactgaaaaccaaaacttagaaactactgtaaatgttgacgcacaagcaacagaagcaccaaaggcagaagataagccaattagcatggctgatgtcttagctgctagaaacaagcaacttcaaaccggtgcagttcctaaccaacgtggtatcactaaggacatcactcttaacgctggaactccacaagaatacactttgacgcttcaatacccaggttttgccattgcttcaatgattgaagacgattcaacccgtgacggtgacgttaagctatcactcgtattaagcaatgctgttgataatgacgtatttgttcaaccacgtattaagagccttgatttctgggacactcacaagggtggggtagatgttgcccgtgaagtgctttcctttcttaacgacggaatcgacggcaacttggaataaggaacatctaaaagaagcggctgaccgttgggaagacccaattaggttggctatgcacggtattccgcttgatttaaccatgaaagcaaacaggaaccagttaaacatgtactgggaaatcgtgcggagagaagaaaaacaacgttttaacatgcaagcaagcgccaccggattaggtgtctggggtgatggaaagaaatagtgaggtgaagtcaatcagaaaataaactgatggcttttttattttgccaaaaagaaagggcgttaatacatgactgatgcacatgaaggcatgtcgctgtccttaaaagctaattttacgcaagtgaatgaggctaaaaaggctacacaggctttaaactcagcgttcggggaattgcagagacgtgcaaatagcttgcacatgtccgctaattttccaagagaaataaaccatattgacacggtaaccgcgtcatatgttagacgtctggaatctgagggtaaaacatacgaggctaatcaacaaaaggtcaaggcatatcagggcgcgatcggcaaattaagcgccgagcagagccgtttgcaaagtgccttgaaccgcaccactagttctactgacaaggctagtgatgcttatagaagtcagcaaataaaacttaaccaaacagttgctgaaatcaacaagtttaaagctggaattaagtccgctcaatctgagatggaacgaatccatccaaccgggtttaaccgctgggtaaagggtgctaatgaggtcaccaaagccaccagtacgatgaagagtaagctccacagcgcgtgggacagcatccgaggtggtgcaacagttgcggcggctggaattggtgccgttggtgcggctgccttttctggcgctaagcaatcagcggcaattcagcaaaggtaccgcgaaattaacaaccttgctgttcttggtggtgaaaagcaaaaagaagtaactaagtcggttactgaaatgcaacgtcaagggcgtgacatgtccattaaatacggcaagtcacagcaagaaatcgcggcagggtatgaagaccttgttaagcgtggttataccaccaaacaagcaatcggagccctccaaaccgaattgcaagccagtgtggcatctggtgacaaattcagcgatgttactacggtatcttcacaggttcttgacgcattcggtatgcgtgcagactcaaccagcaagatgctgaaaaacaccaaaaacgttgttaacgagttggcttactcggctgatgcaacttcaacaggttttagtgacttaggtgttgctatgtcgtacgttggtactgcggcacactctaacaacattagtttggcggaaacagcgtcagcgctaggtgttctatctaacaacggtttggaatctgacaaggctggtactgccctacgtgccacaatcaatggattaactaaccaagttaacaagatcggttctaagaattctatctttaccaagcttggcattaaaaaatctgaaatggtggacgcacacggcaacctgaaagggctgtcgcaagatatggctgtgctttacaagcacattgaagagcatagtaaaggtggctccgaccaaaacggcttctttaagtcgatattcggaactactggcatgaacggtgccatgattttagctaaacattcgaaagaagtagaaggcttaactaagcggacagaaaaagccggtaagactggtacgtatgtagctgaattagccaaaaagaacatgggtaccgcacaaggtagcgccgccagcgctcaacaggctatgaatgcctttaagatgacgctgggtaacgctgttttgccggcaattaacgaagcaagtaactcgcttgctaagttcttactatcaaaagatggtgaaaaattccagaagggcgttggtaaagtcgtaggtgactttgcaaacggtcttgtaagcctgattcgttttgctacacggcatgaaacgatgatgaagtttgtcggtggtggattcttagcaggatacgcaaccgtcaaagttgcaaaagctgtctcatttgtgggtggattgtacgaacagtacaagaagcttgctgatataagtcctaaggttgcatatattggtaaaaccacggggcagttaactggaacaaataccagctttaaaaacatgaccaagggcgcaaaattagctgttggcgtatctgctgtatttaatgcggctcaaatcggtaacgacttttatcaagctgcaactgctaaaaccgcaacgcaaagaattcaaagtgctggtgctggtatcggtggacttgtcggtgctggaattggtggagttctcggtggcacggtaggtgctacgattggtgcacaacttggtcaagctatgggacctgatgccgctaaaagttttgtaaaagcctttaatggacatgctgcgaagtatttggtttacggcaaaaaaggcagcaaatcaaacggcaagtatgatagtcaagccgaaaaatataatgaatccggttattacaccctgtccgaccataagctgaaaggtaaaaagcttctgtatgcttatgatgacaatggatactatgatttaaagaccaataagtaccatgatcaacgctcccttgctgaacgctcatggggaatgaatcatagattaaatttaaagaccttagcgcatccaaataatgcctgggatcttttgagtggttctgcttctacgatttggaacgctgctggacatattgctgatagagacttttggcgtagaagcggtccagaagtcaaaaaagaaaccaagggaacttggctggattggagtggcttttataagtggattggaaacaatccgcatcttaatccacacggtaagccaagtgatggaatggatagaactagaagtttattccgcgatattggtaaatgggctggaaaacaaaattgggactggggaggctttgatcctcagaaaaatggattcaataaatggctagctggatttaaaccacaagttcatggtaaaaagccccaaaatagtcaattgcagcttaaagcatctggaattcttccaaaagttaatgctaaaaaatgggctgatggagttgttaaagatgctcaaaaaggcatgaaagacttcccatcttggactaaacagcttagtgcaaagtctaataagtggtttaagtccaagtggaacggcatggagcgctggggtggtaaaactaacaaagacgttcaaaaaggctggaaaggctttacttcatggtcaggaaatttaagtcataaatcaagcaaatggttcaagtctaaatggaatggcatgaagtcatgggctggcggagtcaataagaacgtacaaagcggttggcatggtttcacctcatggtcaggaaatctaagtcacagatcaagtaagttcttcaagtctaaatggaatggcatgcaaagctgggctggtggaattaacaaggacgttcaatctggttggaaaggcattaaaacttggtttggcaatcttggtaaaaatgccgttgacctatttaaaaagccttttgaaggtctaagtaaatgggtcagtgatcacacaccaaagcctgtcaaggcggcacttggtgcagttggcaagggagtcaactgggttaaaggtaaactaacaggcaaggcacacgccaacggtgggcttatgcacgcctcacacggtgcccttgtcggtgaagctggtcccgaattagcatacaaaccttatgctaacaacgttcgcttgcttggtgctaatggtccgcaatttacaaaggtttatgctggcgagcatatcctgaatgcacgcgataccgcaaaggtattaaacggcggtttaggtaatgggctaaccctcaaaggctacgcaagcggaactgataagcttggcaaaacctcaaagaaggtaactaacgactacaaacaaattgcggacaagtcatccaagtcacttaatagcctttctaagaagagctcaagcacttggaataagattacacgtcaaacgggtaaagacagctctaagacccgaaaacgggctatctctgactactcagacatgcacaaaggcattgtcaagcagatggacaagacccatgacggtgttatcagtcttagtgaatccactgcaaaaggctttggtaaagcattaggcaaaactaaaggctttgccagggatgcaatgagcgactcaattggtgagattaacaagggtattactggaattgacaaggtccttggacagttcggcggtaatacctcagttatcaagccagttaagtttgctactggtactgacgcaaacgggcgtctaaccgaaaatacccttgctatggtcaacgatgcacaaacaggaccaagacaagaagccttagttagtgacaagaatgaattgttcttaccacgtggcaacaatgtcaccatgatgctaccaaagggctggggtgtcctcaacggggcgcagacccaacaggtggctaaatcagccggtgtaaagcattttgccaagggatcagggctaagccatagcgcattgagaaagcttgctgagaaggcgggagccaacccagcacaaagcttcaaagaaatgttcttagacaagctcaaaccaagcggatcgaatttaaagcgtggttctatcggattagcgcaaaattcatctcagcacttcggtaattcttggtctaacgcgatgtggacggtcatcaacaacgcaatcggcggtggtgatggtaaaggtggcactcgtgaagcattcctgagatttgctgagtctacattctctggcgtcccatatgtcatgggtgctatgagtaaggcggctagtgactgttctggtatggtcgcacaagctttaaagcatttcggaattaatgctgggcgttcaactgttgatatgcaacatagttccgccctccaatatcttggtaaaagcattaatcgaactattccgggtgacttggttattttcggtcatgggacaggcgcagccggtcacgtgggtatcgtcaagaatccaagaaccgggacaatgttcaatgaaacaccgccaaaagcgcgtgtcacacgaattgctgatgacatgggtatgggctatggtttctaccgtgtcaaagggttacacaatgcatcaactgctaagaagactgcaaagccagctactaacttaactgcactagcaaaacgcgaacttggtccagccgctttaaagtggattaaggacaagttaggcgatgaaggttcactcggtggcaacatcggtggtgaaggcgtcaagcgttgggctggtacagttaaacgagttcttggtatgttgcacttgtctacttctgattcaatggtcgcaagagtattgcgtcagatccaaactgagtcaggtggtaatcctaacgcaagacaaccagggagtgacccagacggtaacggttctggtccagcattaggacttatgcaaactaagcgagcaacattcgaagcctttaagcgtaaaggctctggcggtatctttaacggacctgccaacatttacgctggcttgaattatgctaagcaccgctatggttctagcttgtcagcattaggcaatggtcgcggttacgcaaagggtggacgtccaaaagcacacactccatttattgcaggtgaacgtggtccagagctaatcactgctgacggtcctgttaaagttgatagtcacgaacaaacaaagcgtaaagtttctgacttagcgcaaatgtttaagtttccaaagattaacagacctacacggtcacacagctcagcgccggtcattaacatcaacctcaacggtcctatctacgggacaagggaggatgctaagcggattgcggaactggtacgccgtgaaattaataaggttctagtaaacataagcgatgaattaggtacggatccatcgctttattagtaaggagttgtttttatttggctaaaaaagaaaagccaaaaaacaagtctaagccccgtaaggggcgcaaaaagactaaggcgcaaattaaagcagaaagaaaaataaaagaaatcaaagataaggctgataaagctcaccgtgcggcaatgaaagccaatgcgacggcaatgaacttttcagcaaaagtctttaacacgaaagatccaaagctgaaagctaaatatactaagaagtttgaagaatacatgaaaaaatatcatgcagacatgaaccgatacaaaaagtatagaaatcagcttaaaccagctaagaccagcaaaaagcgtgttaataaaagcaagaccacggatcaagccgcgatggtcagcaaaattgaacaacataaaaaagaatttacgaatgaaggcaatatggctatttttcctacactcaacgggacagaaagcgatattgtcttttttagccccacaaatacggaatcagaaagcaattcatcaaacattacttcttatgccgttgatcagggggcacctcgtaaagattacgcaagattcaattctaagacggtcactattgacggtcttatttctgacgacattaacggcggtcgcacagcccatgataaatgggtgcagttaagaacgtggcacagtcaccatgaagaattaacgttccgtggtgacatttattacaagcacttgctgatatcacaacttgaccggcaatttaccggtttcaaaaacacgatgcaggtttcaataacttttacatttgttcgagctgctgagatcacgacaagcggcaaaaagaagaatgctaagcggtcgaagtcttctaagacgttggcaggcaacagaaacaagaactacaccgcaataaccatcaagccgggcgataccctgtggggattgtccaaacgctatggtaagtcggtttcttggcttcaaaaggtcaacaagatcaagaatcctaaccggatttatgccggcaacttgatttatgtcaacgataagaagcataaggctaaaagcaagatgcgagttaagtaaggaggggtgaaatgcgtcaatatattccagtgaacattgatgatttgccggacattttcgacatcgaattggctggcgaggtttacacgctaagaattgactataaccccgttgctgactggtataccatcactatttatcagaatggcgaaaccttgctagaacaggagccgcttatacttaatcagctagtcgctattgatattcctgatactcgtttacctcgaattgatatgagagtgatggacgaaactggtaacgcaaaagatgccggcaaggctgagtttggctatgatgttcaaatttacattgatgtgattgatccacttggttcagaagacgaagacccgactatcaaaccactggggtatgaccctgacgaagatagcgatgatttaacggatcaggaggtctcatattgatagttactagcaacccacacatgtggtttgtctgcactaacgataaaggcaaaacccaaaccgtttacaacaacgagcattataagcataattatccgtttacgtttgaagttaactttgctgattcgtctacgccacagcaaaatacggtcactttgtacaacatgaccaaggagcatgcaaatttttatcataagaaattctattgctatgttgcgtttaactggggaccagataagaagattcttgctgagggatttatcgaaaaaatcggcattcctaaccacgatggtacaactgatacctttacaattactttcactgagggcacgaattacagcaatgtagccgctcgcaaattgaaagtaacaaaagaaaagaaggtcaacaaatatgtaacgaagtgggtcaagcaacctgataagacggttactagataccaccattacacagagaccaaagagtacaaacgaggtcctaaaaaaggacagaagtacacggttcgccatcgaacgccatataaagaaaccattaaaggtaagtggcgtaagaaacggattaaaacccgtgctacaaaagtagtcaaagttaataagacgtttcgcaaaggcacggactataagactttgatcaaaggaattgcaagtcaatcaggaatcgtaatttctaagattgacttagcaaagaatccaactttgaaaaagtcatttaccgcaaagggcaaaccattaacactgcttaaacaggtggtcaaaaaaacaggttcaatcatgacctacattcaaggaaagcttgaaatcattaatccaaaaagcacaaagagaacgtggtatgagattgatggccaagacctgttacagccaccaagttacaacgaaagtagcgatgacagctccggtaaaggaacgtgggaaatcatggttccattggttccagacataaccaccaacgtggggattcacatggaaagtaagtatttgaaaggctatttttatgtgaaagccggtcaacatacatttgacatggataaagcacaaacgcaatgttcacttggaaagatttaaggaggtgagtgttatggcacaatcacaaaatgaagaacgtaaggcggctatcaacgcaatgcgcaaatttcaatggggcattatttctggaatggaaaatgcattaattgcaaaagttattgactataacaagaaagatcatacggcggatattttaccgcttgctaattcaagcgacggcgaaacatcagcacaatatctggatattccggttactgaaaattgttacatgttggatgaaatgattgagcgacttaaaccagaatttaaaagaattgattctgaaacgggttcgcatttggttgataagctgcctaaaaagaagcttatgagaaagggcgtcccagtagttgcggtggtattagaccgtgataatgacaactgggaaggtggtagagctgtcaacacttacactccgaatagttcaagggttcatgatgctaatgatgcgattattgttggagttctcggaggtgatgcgaaaaatggctaaggatttattagttaatgagtacggtgatttagttattgaccctactactcacgacttagcaatcgttgaaggaattgacgaaatagcccaaagaataagggctacactgttaattcgctacggtgaaatgcctaatcttgacccagatcaaggcgcagattacagcaatttcattggtaagaattttaacgctcagcttgcatccgctgacatgtctacgaccatcacagaaaaggttccagaggtcaaaacggttaatagtatcacttttaagaaaatgcctagaagaggcttatatgtggcttttagcgcaactgttcaagttggcgatggtcaaccgaaaaacgtagagggaggttttgaacttggcgatagctagtttcggactacacaagcgggggttcttagctcccacatatgaagaaatactggacagtgtagaagatgacttgatgcaacgttttggcaccgatatcgtcctgacaagtaattccaattttggaattattgcccgactgatagcgtggcgcgaaaccttgctaattcaagaactgcaaaaaacttactattctgcttatatcagcacggctactgaaagctcacttgatcggattggtgctaacctagatcttccaaggaaagttgctacaccaagctttgcaaacattcaaatcgtgactgatgacgaatatttgatacaagcaggtgaacagtttgaaaccgatgacggtgttgtgtttgaccttatcaaggacgtaactaccgcaaaagattcaaatggtcagtacattggagtaggagttgtccaatccgttgaaactggtgactttaacaacgttttgcctaacacaatcactattgtttctaatccggacgaagacattattagtgtgacgaatccgcagaaggcagctggcggacaagatgatgaagacgactccacatatagagcgcggctaatcatggaaaacgtggcaaagcctggaccgtcaacagctggtatcaaatcagcattaatgaatttaccaggagtaagacaagtaaacattattgaaaatccgttcgcagacgcggaccaatacggaaatccaccgtattcggttcacgttttttgtttgggcggaaaagaagacgatatagcgagttgcttagcagataaagtagcggctggtatcagtcttactggtagcaaagaagttcaagcaaaagatgcaacaggtgaggttaaaaagatcaattttgattacgcaaccgacaaaccaatttatgcaagggtcaaaattcggacaactgacgaatggaacgccgacgacggtgctgactatgtaaagcaagaaatagctgattacatcaacagtttactgatggacggtaccgtttacctaaccaaaatttatccgtctatctattcaattgagggcgttggtgaggcactcgttgagatcggaactgaccccgaacatttagcagataaagatatacatacacagccgtttgaagccgtctcttgtgacactagaaatattgaggtggtcgtaaatggcatatgagacttctgaacagcttttagctgagatttcagactactggtataagcgacctggtggcaatctttataagctaattgatgcctttaacgagccactagaagggattagtacaaatgcaaataaggtcgagcgctggcgtgctttaaaagacgcccaaggaacaacgctcgacctttttggtgccgacatccagacatatagaccaagtcaagacgacgacaattatcgcttcattattcacgttatggagcttctttcacgggcacagggtactgtaccctcaatcgtgaaaataacgtctagtgcgcttgaatatgaccacggtttcaaaatctggaagacaggtattcgtcacgtagggatgcagataccgtttgatgcggttcaaaacccgcaaatggaaaagtttatgcttaacaacttgcaaaaaatgctggcgatgggttactggcttgacttgataatctttaaagctactacacacgttcacggctatctaggtgccaccacgcaagatagggaccatgacatcaaaacatttgcgtctatctggtgggaaggctacaaagctaccacgtataaccattggtattttgggacagacattaacgagttgcaaaacactacacatgaagaagtggctacttggtgggaaggttggaaagcacaagcaaagcgcatgtcgtacatcggtaccaagcttttaacacatgaatatcaagccttaaaggcaatctaatgaaagaaggtcaaaatggacaaattcaaagacaccattatcaccgatgcagggcgtaaattactcattaatgtcggcgctggtaatggcgaaattgcatatacacgggcggtgctagctggtcaagatgtcagctctatggctgatgaagacattcgaaagcttgccacccttgaaaatcaaaaaatggaggtcaacgtaattgttacacctccacaagacaacacaatcaccgtttcggcttcatttggcaacaaggacttaacggatgacttaacgtttagctcagtcggttggtacgctaaaaacaacaacgataacaaagaaatcttgcttggtgtatcaccgtcaaacggagaacaaacactagcggcaggttcgccagatcaccggtcaacggcttcaattgacattgatttagcaatggctatcagcaatgccgcaaaagttgacttgacggttaacgagattggcgtagctcacatgagcgatgtcaacgcggctattttgaagctcaaagcggagtatgacccgaaaattgagcaagctggcaaggtcaaaggtgcaaagatcaacgacggggcggttgttgaacccgatgatgacggtattcttgacttgatcgttgatagtgaccgcattaaggattttccggcagatttaaaagacctcaatgacctgccaagcgggacatatcggacttcccaaagtgctgctagctttgtcaattaccctaaaatgcaagatggaactactccttttaatatcccaatagtctggaaaaacgcattaatcaaagtagtcaaggatgctaatgctggataccagcttatagtgtccagccaacaaaaatatgcaatccgctattttagtaataatcattggggatattggtttcagcttccgacattatctaataatgacatcatcaaattaattgactccaaggttgacggactaaacatcggcaattacgccactaagacggacttaactagtgtttctaactcagcagtcaaaaaggttaatggcttaacccctgacggaagcggcaacgtaaacgttacctcaaccgttgcccgcggctttgatgctaacgcaaacgctacaactaagatgacggaagaaaacctgcacggcggcaatcagatcttgatggaccagaatgcaggtcaagacatcgttaactgggcaaaaggtcaatttaacacactgaacgggaatatcaataagctcaacgctaaaactgaaattcccggtgttgccaatgcaaatgatttagttggtgacgcttcttcaatcagtacttacaaattaagtaactctggcaatcttaatgtgccggatttctacccagataagcgtggcacgctaatcaacattaattatgatggaaacgctaaaactcaaatttggattccagtaggtaattcaggtggcgactcaattgctttgaggtactgggaaggcaataactatcctaaatggaaaaaacttgcaaccgttcaggatacaaccaacttgcaaaaccagatcaacgacttgaaaaagtcaaatgctgatttgatcggcactgttaactggttgaaggataatgccgcaattgctagaagattcccagctagtcaagaagcgcaagctcaacaatgggaaaatgatcatccaaactactttgcattgatcgaaaaaatagatagaaagaaggtgaaagcatgctagaccacatgatctttgacagactgaaatggttcaacatcagtgacaatactgatagcgtgaccgcaaacggcaagaattgggaagctattcctaaacaagtagtcttaccacaaggggcaaaaattgcgactttttctggtgatggttctgcttctgcacccgatgccataattatgctaaattctgacactactgcgaatgtcattggtaaaattacggactgttacgcagttactggtgtttttaatggaacgggtcaaagcacagaaaataacgctacattaaacttgagctttgatgaagaatacatttttgacgatcatagatatgaagttaattttgtgtcattcggtcttattcgtgaatcagatgttaaaagtacaaaatgggggggtaaaaaccttctacatactgttgcatcaatggttgaacgtgctttctcttcaattaggaaaggagcgaaaacatgctagatcatatgctgtttaataggttgaagtggttcaacattaaagacgatgctgaaagcatagagatagatggtaaaacttggcaagcatttccaaaaaacgttaaaattaatgacactgctactgccttgccaattggaaatataggtcacggcacctacggcgtcataggagtttcaatttcaaattatggaaaaatttatatcatccgaactgatgcaggtcccattgcaattaaatctgatgccgtaatatctgaaaactgggggggaatacctcacttatacgcttgtatcaacggcttaggtcacttttctacccacgtagggaggtggcttaaatgctagatcacatgatttttaacaaattaaaatggtgggactccacgaaccgcccactgatcggtaaaagaatcactgcgtcgcttgatacttaccacacggttaaagcgggatttaactttactgctgcggattatagcaatgtgccggctaaaaccaaggtagaaaatgccttaattgtagcagcttataaatttaatgggtcagctggtaatgcgccaagcggcacatatattttgactgatcaagataattctaaatggttaaaacttgatggctcggaaaaattaggggggtaattagccctctaaccaacttgcgtcaagcgtttagggctactgctagaaaggtggtggctctatgattgaaaagatgatcttcaataaaaatgattatcttatgttccctaaaaaggtcaaaattccccaaggagctcaaataagtaccatttttacggattttccaaatactacttactgttcaatgaacgcagatctggaactggacgtatgcgcttcttcgaaaaacggctatctagttggcagaaatagggatttgccaattatcagtgagagagatagtagcaccgtctatggtcctgtatgggttcgaaaatcggactgtacggaaatcttaggggggggtaattagcccgttaatccacctataccaagtacttagagccgccaccagaaaggcggtggctgtatgctagatcacatgaagtttaataaagaagactactaccctacaacaaaaattattgtcggttatgtaaatacagaattaattggcagagcgataacttgcagtaaatataaagtaggatggtctagagagggaatcattgatgcttattatagctattctatcaatagtgattcgattcaatggaataaaccggatgaaataggcggcttagcttctacgggtgaaatcacaggcgttgtggtagatcaacataatattccatattatattgttgacgttgatcattggataaataatcctaatactggtgatgggatgtacacaccgcttatcaaagcatcggatatcatgactaagtatttatcaagggaacagttatagtattagtactcattgagtgctttttttatgcaaaaaattaaccttgctcacggggcgttcccgtgggctttttaatagaaaggagccaataaaatggctgatgaaaacacacaagttgcaccagtagcgggcgcagaagaaaacgctacacaagaaaacaaggggtttacctattactttagtgatcctgactctgtcaacgcagaaatgcatcacgtagtaattacgttgccttatgagttgccagaacttccatggcactggcacattgaaaagccagacgacagcttaaaagatcctgtctgggacttgaaggttaatggctgggtagaaaactccaaggacggtcaagccgcaatcttgcaagaagctacacaaaagattgaagaattggataagaagagcgcagaacttgataagaagaacgccgcacttgaccaagccaacgataagtttgaccaagcaatgaaggccatgcaacaaagccaacaagtccaaacacaacaatccttagcattgacccaaggcttgcaaaaggtcgcagaagggcaagaacaagccaacaaggttatggcttcaatgcaacaaattctggttggcatgcaagcagatcaagctaagactgctacaccaaccagtgacactaagccagcagaaaacactaacaagcaagaaaacggaggtaactaattatgactgatttaaacgctttatttttacaaatgtgggtacttgactatcaaatggggcttttccaaaagccttactttcaaggcttagttcaacaaggcttattggacgcagcaggttacaagaaagtcacaggtgaagactatgttgcaccgcaagctcaacctgcaccacaagcttagtcgctggaatttcatcaaaacagggctgttaatctcggcattggcggtctgctttctgatagatcgaacctactttttttacccaccaagtctagcacctgcgtggaataacgtctgggtcgatagtatcggcttgatggcaggactaattttgattttgtgcggtgtttttgatattcgggtacagttaatcatcaaagttggtctaggcgtgtcagtagcattcttgacagttctgctggttgcggaaagctttcacatcgttggagccggctatttcagattccaccctgctattgtttttgagatctacgcaatcattaaccttatgcagattgcttatgagtatgacccacaggactgagaaaggagctgatacacttgcaaggtcttaaagacgtacttagtgtactagctccattcctgttggggttgtttacttcatatctaagtgataagagaaatacgagacaagacagccatagctttttagtagacgactatgaggctgtagttaaagaaaataaggaattacgcagggaaaacgaaaaattgcgaaaggagttatccgaaaatgaaaccaaacactagaattttagactacaccactcttgtgcaagatggtgttttaaccttggacgatgtgccacaagacatcaaaggtgcagttaccaagtgggtgcgctatttgtcaggtatccaagacgaaaccatggtcaaggacccagacgcaaccaagccagcggtagaggataagccagtaggctacacccctgctaagacgggcgacatcactagcggcgtacttactactaagaaggtgacccaataatgaatctcactgaattaactgcttacacacaaatagttgttttggctatcgtggctatctgtgtcggtatctctactagtatcgaatactttgccaaaaagtcggctaaaccacttccaaagcaagtaatgaccattgatgagattgctaagtttgtcgtaagcgaagccgcaacgctggatatttctggtgccgaaaagaaggtcaaggctgtacaagccttacttgatcaagccaagcaagaaaacaagccagtgaccgaaacagtcgccaagggtgctgtccaacatgcttatgaccaaatgacagcggaccaagccaaacaagaggatacacaagataccaacgcccaaccaattggctttgtatcaggtgacgacaatgatgacaagaactaagacgtataacgagtacgtttttgaatcgtttgacaaccaaacgaaaggcggtgaaaaagatgtcaagctcaatcgtatcaaagaaaagctatggtgtggacgtagccagcttccagacagaaaacgttagctacacgggtgcgaaatttgctatcgtaaagcttacgcaaggtactggatacatcaacccgaaagcaaaagcgcaaattaaatctgcaaaggctcatggcttgctaaccatgggctatttctatgccaaccattccggctcggtcacacgagcacgggcagaagctaagtatgccgttgaaaaggctaaggcttacggagtcccagctggtagctacatcgctgacgactgggaagaaggttctggcaattcagtcaatggcggtgctagtgccaacaccgatgctgttcttgccgcaatgcaggtaatcaaagaagcaggatacaagccacttgtctattcaggtgctttcaatttacgaaatcatttgagcaccagccgaattgttaaatcattcggaacttgtctctgggtagcctcatataaggtcatgggtcgtcaagattcagctgattttaactatttcccatctatggacggcgtagcaatctggcagtttactgataactaccgtggtcttggcgttgatggcaatattaccctagtcgatttaaagatcagttcgggtaatcaatcaccaaaaaaggtaaacaagaccgtagaatcgccctctcagcatcccgtagtcaagtggaatattggcgctgttgccgtagtaagcaactcaaaaggtgcatatgtttataccagctcaaagctagacaagcgtgaaagtgacaagctaaaaccttgtggttctgtctggcaggtgctaggctttgaaaacggcgctgtcaaggttggcaagaaccaatacttcgatggtcgtgccgtctatgtcaagactaacccgatcgcatacaacgatgccaaacatggcgttgccaagatcgtgatgccacatactcacgccttagatgcaccaaaggcagacgctgggaaagtctacggcttggaacttaactcaaaagttgagattcaagggcgtgtcggcagattcctacgtatcaaagaaaagcacaatggcaagaccgtctacgtcacaggcaatcgtgcctacatcgtgctatagtaataatgattgaaatataaaaaggagtgtgaagaacactccaaatgccgcaagagccgctctgggagatttttcctggagcggctcttttttgtgttatggtataataaaaagagtagtggtattatccgcttgctctcctggttttacttcatgaactttttaataatccatgaagcaattacagtggctaaaatacttgaaaaagtagtagccataaaagctgttatggacatgaaagtaacactttctagactgtgataatttggaattggtggggttccacacagccatatatattttagcaaattttaaaatgagaacaaaatattggaacaatgttcatttttaatatataatagtggtggacatgaaaggatacactttcgtttaaagccccaaagctggttactttgggcatgtgtctagccgtctagtcggtgcttggctcttgctgatctgctgtcacaagagctttttttatgttcaaaataaatatattttagttaattttatttttttgttgcatttatcccgatatcgtgatattataataagtgaaaggaggtaaagatatgtcaaagaaaaaaggcaaaaagaaaaagcccactcgtgatgagacttccgaaaagatcgctaagtatgcgatgatcggagcttggagctatccagcctacgaacttatcaaacaactagggcgaatagttctaacacttgtcaaacacaagtaagctttaaagagggaagccgagaggctcctctctttgacatatctaattataccatgacacacaaacaaaaaatgcatcgttatttagcttggagtgtagttgctattctattaggattactaattaaaatgataggaagtgcattctagtgattaacttaaatagtccagatattatggaagcaaaagaagcagcaagaatctggggcgtatcagagagctatgttagaaagaccattagtcagtcacctcaaaagtttccagaaggaacagtgcgtaagtttggaaagcaatgggttgttaccactgagggtatggaacatgctactggtaaaaaagatcctagaaaagtgttataatcaaattgcctattgaaatataaaagaagaggggtgaaatactcctctaaatctatcaagaaagccaccttgggagaaatcccagggtggcttttttattttactcatgatataatttttaacatctcttctgagataacatcaaattttgaaccttttgatttatattgatgtttgctccacggttaatttcgtggggctttttttcttgtggtataatatatttatattactgcacgactattcattgcgaatacagaaaaagggaggaaccgagttggttcttcccatttctgtttttacgtaatttgcggaaaatttacggaaaaaagcttattactatttttgatttatgatgattcaacaaataaaaaaatgcgtgcttactgtctatgatgacctatgattatagtatcttaatttggtcatattatttctaatttgttagttcattctttgaaaatcagtcaagcaagcttgtttgctcaaggcagtgcaagcctattcttagcagataaggcaacagagtggctgaactatgagcatgaagaattcaagcgtttaaaccatttattagttaataacggggaaagtattccgactactagcaagcaatttcaggaatataccatgttggaagaagatggcagtagcaaatatcttgcaggtgaacaacaattattcaacttggtgaaggattttgatacgcagattttgtttattactaaggctattaccttagctaatgatgaaaattggccagagttagctgctaatttgattgatttgcttgcttggattaaggaacagattagagtaagtcaaagttttttaggccatgatctcaaagaaggattgtatactgaagaagacgatgatgacttttagttaaaggaatgagtttaatggctgatttatgcgttgatctggtaccattatttacggctttgccacaagatgaaaaaataaaactagaaagattggtgcaacatcaaaattatcaaaagggtgagatagttattgatccaactgtaagtgctaatttagtaattgtggcccatggcagtaccaagctatatacattagatgaaactggacatgaggatgtcttacaggtcttacatacaggggattatgttggtgaagactggctttttggtcaagttaatacgcatagttatgttgaagcaactgataatagtgaaatatgtttattaaggcgacaagattttttgaagttgatccatcagcagccagaattgagcattagattattagagttaagtatgacaaaaatttctgctatgcaaaagcaaattcaattgttaactttacctaaagttgaagagcgcttattcaaatatttgcaaatgtatgcaaatgaaattggtcaaaatagttttgttttaccgttaaaactgaaagatctagctttgtatcttggtacgaccccagaaactttgtcgcgtaagtttgctttactcgaagaacaaggcagattgagaaggaaattgcgtcagattgatctaatttaggatggcagaaatccatgaaaaaatcagaacgattgaatcaagaattaatttatttgagtgacaaaaaagtttttcatctaaaagaattagaagaacattttgctatttcggagcggacagccttgcgcgatattgcggatttggagcaattaggtctagctttttatactgaaagtgggcgcaatggcggctaccatttgactaatagtaaattgctgctgccaattcggtttaacacgcaagaaattaacgccatcttttttgcattgcaagcaattcgcgggatcagtgagacgccgtacagcaatgcgtatgatgaaattgaattgaaactggttaaaagcctaccgcagaatttacaagagcaggttaagttgcagaaacaattagtgcatttctatagccagccaagtttaaatgaggtaaagtttttcgcgactttgcttaaggcatgcattgataacagcttaattgaagtggaaaattttcagtttgtgcagggaaaacaaaaactgcagctgctcgatattttctttcaggcgggcaattggttctgtcatgcctataatttagacctgaaaaaatggtacgttttgcgtttagataaattcgaggcagttcgtgttttaccaactgaaactaaaataatgaataaagaaccattaactgccaacttgcaaaaatatgaagaaaattattatcaagtgccgtattcttgcttattaactgaaaatggcgagcaaaaggtgaagtataattcttacccgattatgaatattgtgcatgatgcagggaaaatttatctccaaggaaagtataatagagaagaattacactatttggttgattatctgatttcactaggcagcgacgtgcaggtattgcagccgagtgaattgaagaagaattatctcactaagttgaagcagattatgaaaaaatattaaataatgtcatggtttgtcgggattagcctttatattatatttacaaatttgagaggagataaaaattatggcaattatgacagaagaattcttagatgttttacgtgataagggactcgctacaatcgtttcgattaacggtaagccggctagtgtggtgaatacttggtcacagtatattaatgtagtggctgatgacacgattttgattccggctgcggggatgcactcaattcaaaatgatttgaaggcagatcctgagcacgctttgacaatcgcggttggttcttacaattatcctggcacaactggtatgggccgcggctatcacattcacggtagtggcaagttcatcactgaaggaacttattttgatcaaatgaaggcgcaattcgagtggattagagctgttttagttgtgaaaattagtgatattgaacaaaaaatttagagtataatgatggcatcgaggtgacagaaatggaaaacaagttttgtcataatgggatgaaatgccaagatggttgcccttgcgctggtaaagatggcatttgtcattgcccgatggccgatgagcaaaagtgtatgtgcaagagccactgcaaggaaaaggaagagaaatagataattaagtgtttaggaaaagaagctgattttctaggcacttttttgataatcaaataatttgctgtaatcactttcatcagctatgatatattttataaagtaagttatttttggtgaaaggggcaaatttatgaagtatccaaaaacaaaagaaattttaaatcaagctgtggctgacaccactcaattaatgatggttgtgcgccaacaacactggtatatgcgcggacctgaatttttgaaattgcacccatacttggacaaggtaatggacgagttggatgaacaacgtgatctgatctccgaaagattgatcacgattgatggttcaccatattcaagcttacaggaagtgcttgatcatactaagatcgaagctcatcctggcgaatggggaatttcaactagagaaagatttgcgactatcattgctggttatcgttatttggagcacctttatgaagaagggattaaggtaagtgacgaggaaggcgactatggctcaaatgatatcttaacgtcatgccatacagatattgaaaagagaatctggatgatgcaagcacagattggtgaagcaccaaaaattgatcgataaatgaaaaaacactgatagatcaaattgacctgtcagtgttttttagattaaattatgttctttgcaccagttggttgctaatttcttctcggcttgatatttatatttttcatagtcttctagaagatgattttgataaagtgtatttttgaattttcgaaaagcatgtcttccattaaaactatcaagtaacagattgcctagttgattattttcaagctggcagcagtaatcaaagattagtctattctcgtttaaatcttctttagacggaagagcaataaaacgcttgtcttcaaaatcattttgaaattcttaatacagcttgtacgagtctttttcccaattgggtagattctttaaagtggcatctgtgtcgtccagatagttgaagtcttctttattaaagtaataaacttgtttttgctttttgtcataaactggaaaaatttcaggattaaaatttttaattgcatcaattttatgtaattgataataatcattgtactgtattatatgtctattacaatactcttggctaaaagatgagactgtaaaatattttgtgtaaggatgaatgattccttaaatttatttctttaaacattagaaaaaggagttcctttctcgtatgattggtttgaacaaaaaacaacatacagaaagaggaactccttcatgaatgattttaccaaaaatattgctcaagctatattcgatcaagacaaaaaaataaaaacagtgaaaaaaatatgagtcctggatttaaaattgaagtgcaacactaagtgttaaacaaaaaggccatgaagacctaaacttgaattgacgaaaaatcaagaaaggaagatcttcatgaccaattcaaattctagcatttctaaacactatcatcaattaactagcgtacaacgtggtcagattcaggcaatgctggattctggtataacttcccgtactgtcatcgctcaagaagttggctgtcataaatcgacaatcagtcgcgaaatcaaacgcggaagcgtcctgcaaagagacagcagctatttgttgtatgagcactattacgctgatactgcacagatttattatgagaagcgtcgcaaaaactgctatcagcgcaattcattgaagcattatgctgtctttttaagaatgttctcaagacgcttcaaagctaaatttgatgccaccagcattgatgaattcgttggtgaattcaaaaggactatgccaggctatccttgtcctagcacgtctaccgtctatcgttatattgatcagggcttggtggacatgatctgcctatgaagctcaaaagacgcaggaacaagcgtcatcacagccatggcggtcacgctttgcacaagaatcagcctgctttaatgactttaactgaaagaaccacacgctttgaagtagttatcaagattcctgactatcgggcaagcacatgaaagacaagtcaaaagcttatgttcaacaggcaaccaatgccattaaccacaaatatcgccgaatcctccaatatcagacagcagaagaactcttcaagcaatatatctcttcataacctaactgttgcacttaatttgacaattcaggaagaattaattatcatatttcccgcaaaaaagttgttgtgcaaaattatcctatcaaagaaacgggagctacctacttgctaaagccatatgagctactagtagaagaaacttataattagacctttgagtcaccaagcgtattagtgcttcggtggctttttacttgtgtgtcgggcatgacatttcatctaatccaatgaaagtttggaccacgggtatttgtcgccaagtgtagtgaaccacaagccgatagcggtgacgctatgggtgaaggaagtggctagcgagttttccgagcctacgtacagaaacctggttaggccaaatggcggataaggctgcgatacaagtcgaagtccaaaagacaaacgtaaagtcaagacggtaaaccaggaggcagtggaaaatcaaagatgaatgtcttaccccgagagatcttgcggacaggcaagctgagcaagctttaacatcagcgatcgtaagcctggtcgaaaaaggttagtcgcaagaagtcagctgaggtcatagtagtgttgaaagtcttgtaatgagactggaaatgtttgtaagagcatatcccgctataagcaatgttcagatagtccgaataagaggatagcctagcacaaagagaacgtaactctttgatggtgaaagcaattgggatgattctgaataaatttacaagtagaaatggagatattacgagatgaaattaattgaacagattctaagtcagagcaatcttaaagaagcgattcatagagtcaagattaataaaggtgctccgggagtagataaaagaatggttgaagaacttgatagctatttcagaaagcatcaagcagaaattaaatacgcaatcatgaagatgatggatatcaatgggtaattgatttagatattgagaaatattttgacacggtcaatcatgataaattaatttcaataattagagaacgagtaaatgacaaaaccaccctccatttgattcggtcattcttaaaatccggtatcatggaagatggtttggttaagcccaataagattggcgtgcctcaaggcggaccgctttcgccaatcctgtccaagctttataacaagattagagagcttctttgtcgcaggaaagcagctgctcaacctctatcgttagtctttactaaggtaaatcaagtggtcagaggttggattaactactttaaaattggcggtatgaaatactttctatttaaattcagtcaatggctgcgccataagatacgggtagtaatcattaaacaatggaaactgccaagaagaatatacactaatttaatgcggattaacaaggcattaaagtgcaattttagcgacgaagatattcataaagtagctaatacgcgattaggttggtataaacgcagtaccggacatgttgttaactttttgcttagcccaaaagtattgggcataagcaaagcggatcgcccaggcttggtcgatccgctagaatactatttatctcgtagatgattacaaacgtagcgccggatacggaaccgtacgtccggtgcaatgagaggggcgagaattaatctccctctactctattactttatttgtttatttagcgaaatcatttctaatagactctgagcagtagaggaaccttcattgccagcttttaagccggatcgttgcaaggcttgatcaatattctcagtggttaaaataccaaaagttattgggacttctgctttaagattcatctgcataattgcgtttgtaacattctgaataatcatgctgtaatgatcagtctcacctttaatgacagcgcctaaagtcataataccatcgtagttatttgaattgagaagcttattagcagtaaaaccaatttcaaaagcacctgggacccaatagatatcgatctgatcttcaagtactccaaattgctttaaagtagcaatagcaccgtcaactaaatgatgggtaacggtttcgttaaacttggatgctacaattgcaacgtgataattattgtttttaaaatttccttcataaatattcatttctgtgttcctcactatagtgcttctaataaatgatggaatttatctcgtttagtttctaaatagtcatgatttaccttattagcaggaatttccaagggaattcttttttcaatagtaataccgttattttctagttgatcaattttatcaggattattagtaagcaaattgatatgactaatacctagatcttttaaaatcttggcagcaataatataatttcgttcatctggcttaaaacctaaaatttcatttgcttcataagtgtcataaccttggtcctgtaaaccataagcttttaatttgttaattaatccaattccacgtccttcttgtcgtaaataaagaattatgccactaccatttttattcatttgcttcatggcagtatgtaattgatcaccgcaatcgcagcgcattgagccaaacgtatcaccagtaaggcattctgaatgaagacgtactaaaactggctttttaggatcaatctttcctttaataatagctaagttttcattggcgaaagccttaattttgaaattgccatatttagtgggaaaatttacaaactctgagcgtttactcacaggactattaatatattcttgtagttctgcaattgttaaaaatggtaagtgatattctttagcaatttctttcagttggggacgacgagccatatggccatcagctttcataacttcacaaatatatgcaacttctggttcgccagcaagatgagctaaggcaatagaagcttctgtgtgaccattacgattcttgatttgatcatctttagcgactaatggaaaacagtgacctggtctaaagaagtcttctggcttggaagtaggatcagcaattgccttgatagttgccgcacgatcataagcagaaataccagtagtggtggttttgtaatcaacactgattgtaaaagctgtaccatatggatcagtattattttgttccatttggtagaaatttaaacgttgggcaattgttttgcttacaggggtgcaaagtaagccacgagcatgtttggtcataaagttaacattttcaggagtaactttagaccctaagccgatcatatcaccttcagattcacgatcttcatcatcagcaacaatcactaaaccaccatttttcatccattgaattgcattttgaattttttttacgtccattttaaattctcttttctaaatttttagcgacatatttacttaagatatcagtctcaatatttacttctgagccgacatttaacttacttaaatttgtttcatcttgtgtatgaggaattaatccaactgagaaaacattatcatgtgtatccattactgttagcgatacgccattaattgcaatactaccttgtgctacaatctgattttttaagcgagtaggaaaggcaaaccaaacttcaatagcattttcgttagtcctgatttccgtaactttggcaatatcatcaatatgtccagtaactagatgaccttctaatctttgtccgacctgtagtgaacgttcaacatttaattgggcattgatatccaaattcttaaaagtagttttctgataagtttgtggcatcatcgttactacaaaagaagtatcagtgtattgctcaacagttaaacaggttccattaactgcaattgaatcgccaatttgcaagtttttagtaaagtcgggctggcaagcaacagtcataacaatagtttcatcgtttttatcaatagcagcaattcgtgcgtcgccgcgtactagaccactaaacattaatttcaccttcaattctaaaattatcatccaacttttcagcacgtaaattatgtaaagttgttttggagctgggtgaaattcctagctttcctttttgaccaagtaaaattggacttatgtaagtaattaaattgtttacttgaccttcggctagcaaggcattagctagggtaggaccaccttcaacataaaccgactggatctcttcattggtcagtttttttatgacttcggtgattgaagcgtttttcatcaaaaaaattgagatattttcattatgtggagtcttagctaagcttgtattttgagtaaaaatccaagttggacttaacttatccgttaataacttaatatttaaatgattcagtaatctaccacgtcgatctactattattcgaatgggtggaaaatccgtagtgacagtagtcagtaaactaggattatcgataatggcagtatttgatccaatcatgatggcttgataatttgcgcgctctctatgtactcgctgataaacagtttcatttgttatttgagtgcgaatatttttagcctcattaattcgataatctaagctgaccgcctgtttcaacgttatccatggatgattatgttggtagaagtaagtataaaacttgtttagcttctttgcttgatcttctaatacgccaaccgttacttgaatattgtgttgccttaacttggcaatacctttacccgttactagttgatgtggatctacttgcgcaattaccactcgtttaattttgctagagacaattaaatcagagcagggtggctgcttaccataatgactgcatggttctagagtaacgtatagggttgaattaaataattgttctggagttagttttgaaatagcatcacgctcagcatgataataaccataacgaatatgatgacctgtagccaagatattgccatctttaacgatgacagctccaaccatggggttcttccatgtttgatagagtccttttttcgcttcttggatagctaattgcatatatgcttcatcactgttttccatttctttcacttcctaacagaacaaaaaaagaacctcgaagaattacctcgaggttctaactaacattcaaaaaataatttaagtacagttcctactatcaaaatagaaaagagcacagcaaaattattcttcttccatctagactctaactatcggtaccattaaaggattcaaccgcttatgcgggttgcggactttaccgccggtcgggaatttcaccctgcctcgaagaacattatttaattcattcttagaataaaaccgctttctaaatttgtcaataacttttttaattagaaaaattccaaaggtgataaaatacgctaaatctttttgaaattccttttagtgattattgagggttctataataaaatgaattaacaaaagcaactaatgaacacgagagtgataaaatgaataccaacaaattaactgaattacttaataagatgaatgagtatcgtcccttagatcaagcacaggtaaaggctctagaacaagtcaaaaaagagacaaatttataggatacgcgtggtgctagttaaatcgttttagttaataaaaaagtccaattagactagactcaagttgtaagtaatttaaatagaaaagagtctgatctaattgaactatctcaagcttaatcgtttttctcaccatttacaagttagttttaatcggttaaatgtgatttgtcgctcgctgtataagctttatgcgcctgatggacttaaacatcgtaaaaatgttgatcagaccaagcttcctaatagttctatcttagcgatgctcatttggcaaactgaaattggaattgaatctcaacgaagattctgtaaattcttcgttggcttatctcattctcgttttaaccgtcgagctcgaatgctcttgcctctaattcgttgtatccgtcaggcttggaatcaagaagtaaagacagctggagaatttttgattattgatagtttcccagtgccagtttgccagcctgttcgcaattatcgtgtcaagatctttcggggcgtagctgatattggttataaagcaaccaagaaagtctattattatggcttcaaggtccacgcaatagtaagcgatgatggctatctgcttgactatgcagttactaaagcgtcagtacatgatgccaaagagacagtagaattgatgatcaatgctcatccagccaaccattatcttttaggagatgaaggttatttaagcaaaaatctagctactaatctaaagcacatgggatatgtgctttggacgccatatcgtaaaaatatgcaaggagctagaaggcataatgatcatcaattgatggcaattagaagaagcattgaaagcgacttttctttgcttagttattacaacgctgagaataatcgagcaagaagtccagtaggctttcaacagcggctagaaatagctattttagcttataatatggcatattgtctagaacgatttaactagcaccacgcgtataggatatttattgaaaaatcaatttaattagaaaaaactctaaaatgaagaaaatttcatttgatctacattaaatcttggtttttaaaggttccttttttcgtaaactaagtgtacaaagttaattaatacgaaaagcgaggaattcaattatgaaaaagtttaacattaaaaaagtatcattggcagcagctgcattaggcttagcagcgggtggcgcaagtttattggcgattaaccaggctaatgcttctactggcactcaaacgcaacagagtcaaagcaataacacagaacaaaatcaaagtaatacaggtactgcaagtattaatctttctcaagaagatgcagttaataagttttatgaaaagtatggctcaaaatcaattaaggagattgaactagagcaaaagaagaattcatatgtgtatgaaattgaaggttttgattcacaaaatgaatacaaagttaagattgatgcaagtaatggcaatattttaaaagctgaatctgaaaaattagattcagatgatgaggcgcaagcattagatcttaataatatgatgactcgagagcaagctactcaattggctcaaactcaggtatcaggtcaacctgttgaatggtcattagaaatggatgatgatcagccaatctggaaagtagaatttgaagatggaggtaagaaaaccgaagttgaaattgatgctaaaaatcagaagattataaagactgagactgaagatgatgaaaaagatcatgacaaggattatgaaaaagaaaaaatgacagtcaagagcaccaaaatactgatgaagattaataagtaactaatagttagaaccgtttgttttaagcaagcggttctttttcataaatgaaattactatacgttttttgaatagtagcatttaatattagtaattttatagacagtctgttttgattagactatgtatataaagtaaacgatagtaaggagaaataatatgaaagcagcagtttttgtagaaccaggtaaagttgaagtaagagaagttccaaagccaaaaatcgatggtgaaaatcaagcaattattcgtgttatacgtgcaagtgtttgtggttcagacttatggtggtttagaggaattgctgatcgtgaaagtgggtctttaattggccatgaggcaattggtgtcgttgaagaagttagtgatgaggtaactaatattaaaccaaatgattttgttctcgtaccatttactcatgaaactgtcaaatcttttgtgtaaatagttctttctcgtaaattgattttttaatcatttatttaatcaaaataggattctaaggtatcctgaacctgaccaaagcctttatgaattcggttgaaatagcggtcattgtagctcattgcctggatgccaataaatgcatcaagcgactgttcagttggaaattctgccttaggcttagctttacgcttgatgacgttgttaaaggattcaatcatattggttgaataaattgaagctctgatttgtttgggataattgtagaagaccagcagatcgggctcaatttccttcaaacctttgatgacatggctataagctttattccatttggcatagaatttgtgcaagacagctgcagcttcttttttgcttgtctgttgatgtatctgcttgaattcgttcatgatcttttcgcggtcatccacccggactttagcacagatattgcgcatgacatgaaccaggcagcgttgaaaatgagctttaggataagtcctggccaaggctgttttcatgccaacaacaccatcagaaagaaagagttcaacttgcttcaagcctctggacttcatgttttgaagcatctctgtccagacttcaatgttctcgctaggagcaatgcagtagtcaatgacctccttgtgcccattaggcttgatgccaatggcaatatagactgcttcacgctcaaacgtttctcggcgcaaaggaaggtatgtcgcatccaaatagacgcagaaaaacttgtcgcttagcttgcgcttgtgataagcctcaaccttggggagcatctgcttggaaatatttgatacttgagctggactataatgactgccatacattttctcaatcaagtcagcgatttctctggtggttacgcctttggagtagagcttgataatcgtgctttccaaaacatcagagtgctgcttgtagtcaggcagcgtgtgctgatgaaactgaccgttgcggtctcgaggcacttgcacttcaattgggccaaattgcgtatcaactttgcggaaataagcaccatttctagaattgccagtattccagccatttctggcatagggatcatagcctagaaaggcagtcaactcagcttctagcaagttattaacagcctgttgtagctctttgcgcaataaatcatttattttgtctggattgaatagagcttgagcaaaatctttggtaaaatcattcatgaaggagttcttctttctgtatgtgtttttttgttcaaaccaatcatacgagaaaggaactcctttttctaatgtttaaagaaataaatttaaggaatcattcatccttacacaaactattttacagtctcttactcatggatatggtcattgtgttgcatgtattaatggttttgaaggcaattgcttgaatttgaagccgggtactaacggtggctatcaagccgaatttatgaaatatgaaccagcaaactctggattagttaagattcccggtaagccaggagattatactgatgatcaattggcatcccttcaaacattgtcagatgttatggcaactggttaccacgcagcattaaacgctgaagttaagaagggcgatactgttgcagttatcggtgatggtgccgttggtcttgccggtgttattggtgctaagttgttgggcgctgaaaaaatcattcttttatcccaccacgatgatcgtgcacaattaggaaaagaatttggtgcaactgacattgtttcaagtcgtgatgatcaagcagttaaagatgtactggctttaactaaggaaaatgctggtgctgatgcattcttagagtgtgtaggtgctgaaagtgcaattgaacaagctggtcaaattgctcgtccaggtgcggtaatcggtagagtaggtgtaccacatgcagagcctaagtcaaaccaattattctggaaaaatgtcggtcttcgcggtggtattgcttcagtaactaagcctgataaagaagttcttttacaagctgttcttgatggaaaaattaacccaggaaaagtatttactaagagttttgatttagatcatatccaagaagcatacgaagcaatgagcaatcgtgaagcaattaagtcattgattatcgtgaacgaaaaataaataatcgcgcaaagcgtgcgtaaaaacggtcgaaaatctaagtgtataattttttacggtaagttgaataaataattaaaaaagcccaagtcctttgaatttggacttgagctcaaacaaaaagaccagtagtctgatgttaagaacaaaaaacacattagaagctggtcttttatgaattcaattgtaactgaaatcgcaaatattataaagtctgaagataattatattaagcgtgaaagaaaaataatctgtttcttcttaaacctgattaaggaaatcatggccttggctttagctaaagttgatgatgaaatgattaccaaggttaaagcacagggctatcagattgataagaagaatgagcgctcaatcaatatggcttttggcgaagttaggtatgtcagaagaagatatgtctgcccaggcaaacaagcaaggtatcccttggatgaattaatgggctttgacaaatacaagcgctacagtattttagcagtcaaaaacatcttagaagtaagcagcgttgccacttatcgcaatactgctctagcagtcaattgcctgtctggctttaatattagccatatgcaggtgggcaatttggtaaaaatggccgggaaaaatattaaagcgggccaagaagcagattcaagatatgatgccgcaggcactaagaaaaaggtcccagttttgtatcttgaaggcgatggcgtggtgatcaaaggcactaaaagccggttggaatttcatcgctatcaggtctgtgaaggcattgtcaatataagcaagaaacgcagaaagcgaatcaatgccaaggaatttgtttctttaagccgacttgatgcgctgaacgaagccaaggagtacctggccaatacttatgatctttctgatactgtaattcttagcaacgccgatggcggtgctggatatgccaaaacagacttcgatgacattgtagggctatgcaagcgtcatgagcatttcttggatgtctttcacctaaataagaaaatcaaagaaaggctatattttgcgcctgacctgcaaggcaagctgatttctgctttggaatacaaatacagctatgacaaagttaaaactatcctaaccactgcagaaagccgactaattgatgaattgaataccgagctcaatcatgattatctggggcgcctaaggaattatattgatcgtcattgggacgatattaagccgtttaagaaacgaaaactgactgtgactaaagccattggctgctgcgagagcaaccaccgcaagtatacctaccgtgttaaggggcaaggcaagaaatggtcaaaatctggagcagaaggcatgcttaggatcttaagctgcatcaagaatcgagagctggaattttggcttagcagcgagtttgaagattcagaaataactgtattgactgaacaggaattaaaagcagcggcccgtgacagcttaaagaagcgtcatgaagttcatttaggcatccagcatggcgcattaaccgcacaggtagctggcaatagttatttaagcaagctaagcagaaatttaagtcatataaatatttaagaaattaaggttagactaatggtttaaaggctaccgcaaaaacattgacacttacgtcgaaaataaaatcgaccgtttttttgcgtgcgaaagagtataattgtagataaaatagattggcaaggtgacttaagtgagagaaacaaagaatttagaatttaaagagaatcttacaaacacatttttaaaaacggttagtgcgtatgcaaattatggtacaggagaagttaaatttggtataaaggatgatggaacaattattggtgtaaaaaatccaattgatttttgtttaaatgtagagaataaaataaatgattccatccagccacatccagattataatttagagattgatgataaaactaatgtagtcacgttgacggtaaaacagggcgataatccaccatatttatataaagcaaaagcttataaaagaaatgatagtgcttcaattgaagtggatagaacagaattatcacaactaattttgattggcgaaaataagacttatgacagtttaacagctgcaaatcaaaatctatcgtttaatattttagaaatggcactaaaagaaaaactaggaattaataaattgacatccgatgtgctaattactcttaatctagaacagaagaatgccggatatactaatgcgggtgaattattagcagataaaaatcattatcgtgggattgatgtcgttcgctttggtgaaaatattaatattatgctggatagggcaaactatgagaatgaatcaattcttaaagagtatgaccaaactattcaaaaatatcggcagtattatcagcgtgaggaaatacatggtgttactcgtaacgttataagtcaaattcctgaagaagcttttcgtgaagcaatagctaatgccttggttcataggacttggaatattaatgctcaaattaaagtttctatgtttgataatcgaatagaagtagtttctccaggaggattacctcataacttgagtaaagatgagtatctgtcaggtcaaatttctattttaagaaatcctattgtggctaatgtcttttttagattgggtttaattgaacaatttggtacaggaataaagagaattaaagattcctatcaaggaagtttagttcaaccacagttcgagatctttgaaaattcaataaaaataattttaccaattctaaaatttattactgatgatttaagcgatgatgaaaagaaagtatttagaaccattcgcgagggtgcaaatacttctacacaaattagtcgagcaagtaattttggtaaaacaaaagttttaaatctacttaaacaactaacaaagcaaggttatgttgagagaattggtgagggtagatctacaaaatatgttttaaataaataatcgcgcgcaaaacgtgcgtaaaaatggtcgaaaagcaaatcgaccgtttttttattgcttagttaaaatctcgtaactccaattaatcagtttgttattataagcaattgctatatttttatctcctgatttgattaatttaattaattttagattctcttcagaaatagaattaacatcgacttcattacagatccattcacctaaagttaaatagattgatttaaagttattgataagcaaaggataaacataattcttggaggccaaggctaaactatgtacataagcaaatatttcttgtgcagcgtccttggaattggtggctttggcaagattttgcatatttgaaatagctgattgcaggcattgttcatcctgttctatacaatctaagcgaacaacatcattttcaattagtttcctgatttcaaaaatcgaatttaaaagtgaaattcggtaatgtcccccgtagaaattaataatttcgttcattgtttgcaaatcgccatcgacacgataatctgctacaaaagccccatatctaggacgaatttctataaaatgtaatgccgctaatttttttaatccggaattgatcacagttcgacttacttgaagttgttcttgtaaaactctttcactgggtaatttatcgccgaggttaaactttcctgttaagattgctgtttttaattgattaacgaagaataaatctgttgcagtgggtacatttattgggtgaaatttcatattattctcctttgcactggtaggaccagaagccaacggctagtttatataaaataactttgtttttctttactttgatcctttttttaattcatattaattataatgaaaacgtaatcatttgaaaacgaaagggttaaaaaatggctgaaaaatatgatgttatcgtagttggggctggcaatggcggcttaatggccgccgcaagttctgctagaatgggcaaaaaaactctattgattgaaagacataatctggctggtggagcagcaaccagttttattcgcggcagatttgagtttgaagtagccttgcatgaattatgtgaatatggtcatgctgataatccgcgtgcagtacgaaaaatgtatgactggttaggtgccaacgtaaaaatgcaagaattaccagatacttatcgctatattatttatggtaaagacggatttgatgttaagatgccagctggtagagaaaattttattaatgcgatggaaaaatatgtaccaggtacttcagaaaagatggaaaagctttttgatctgtgtgagcaaagtatgaatgcgttagcagaaatagcagatggaaaggataaaaaagaagttataaaaaaatatccagcttttatcgagtatgctactaagagttgggatgatgtgcttaacaaattaaaacttcctaaaaaagctcaacaaattcttggagcatattggtgttacattgatattcccactgatgaatttgaatttccgtattttgccactatgttagctacttatgtagaaaacgatgcctatattcctcaaagaagaagtcatgatatgtcaacagcattggcacaagtaatttatgataatggtggtgatgtttggctgagtacaactgtagaaaaaatcttagttgaaaatggtcaagctgttggtgtgcaaattaaaggtgaaaaagtttttgctaaggaagttatttgtggaattactcctcacgcagtttatggcaacatgatggatcaaaagtgtattcctgagtatgctttaaaatatgcaaactcacataaattaggaaccagtgcctttttggtgtatcttgggctaaataaatcctgtcgagaacttggaataaatgactatagtgtgttcattgcttcaacaggtgatactagaaaacaatatgaaaattgtaaaactatggataaaaatgattttatgatcatgaattgcttaaatactgtcattccaaatgcttctcctaagggaactagtgtttgctacattactaaattagttgatgatggtgtttgggataatgttaaacccaaagattatgaaaaacttaaagttaaaatagctaaaaatgctattgatgagtatgaacaggcaacaggtattaaaattagtgattctatagaagagattgcaattgctgcaccaccaacatttgctcgctatatgggaacacctgatggtgaaatttatggctatcattgtgcaccatgggatcaaattattggtagatcaatggatttaaagaacgttgtaaatccactgccacatttatatttctgcggtggtcatggatttatgtgtgatggttacaatgtttcatacactactggtttaactgcagcaaaaatagctgttagtgatattaataatatgggagcagatcatgaataaatttgaagagattaagggaattattgatttaaagaagcttcaaaatgagcgaaaacatgaaattcaaaatgcttcggatgcagagttgcctaaaaaatatccgatgaacattcttgaagaggagcttcatcctgaaacgcaatatttgaaaatcactaagattattgaccgtgacgatgctaagagctttgtatttgtaccagatgaatcaaaaggtaccagcaaacttgcatatttccaagcaggtcaatatatttctttaaaacttcatattggtaaaagttattgtacacgtgcttatgccatttcaagcacacctaagcaggcgctttctggcgaatatatgctcacaattaagttagtcaaaaatgggtatgtaactccttatatttgggagaattggaaggttggcactgaagtagctgcttcgggtcctgctggtcaattattctatgaaccattaagagacaagaagaccattattgctggtggcagcggtattacaccattttactcaatggctggtgcaattgctgatggcacaattgatgcaaatttgattattttatatggaagtagaacgcacaaccatattttgttgggtgatgaattagatagaattgctgccaaaactgataaggtcaaggtcgttaacatattaagtgatgaagaagtagtcatgtggtaataagtcaatgtaaaagttaaattttatttttaattagtttgttttaaaaccaaaatttgcgtgcatgaaactaagccctatttcaagggattttttaacaactattatttactcctccaaaaatgttttagaccaattaatcacctcggtgtttgatagatttgaccatttttgagcagagtgaaaatggtcctggttaattttcttgcacaaagaacgcaagcgcgtttatgcggagaatagaaagcttcatcgtatttcttttgatagtacttccgaaaaacgggatctctttgtctaatcaggttggcagcttcaaccaaataatatcttagataatgatttccgtttttagtcatcggtttgtgttcgctatcaaaattactagattgcttttgacgccaagctagaccagcgtatttagctagctgtgcttcagtgtcaaagcgatcaatactgccgatttcagcgataataccagcggaataaactgacccaattcctggaatagattgtagtattctctcttcaggaagcgtttggacgatatctgtaattgctttatctaagttcttaatcaatttctgattagttttaatttcggcatagtaaacagataatacggcatcaatcgagtctttcatgactttacctaagcgatatgatcctctaacggcttttctgatcgctttagctaaagtctctggatcagagaagcggccacgtccttgggtttgaaggtagtcaattagatcctcgattggcatttcagcgatttcatcgatggttttactatcagtaacaattgacagcatcgttgcgccaaagatagaagttttaatattgtctttgtcaacggtaactagtttgtttacacgataataaagagtttcaatgaagtgctgcttagctctagtgagcgaagatgtgatttcatatctagctctagttaaacgctgtaaagctaagtattcctcttgccgagcaatagtgacatggtatttaccaaagcgtaagtattcagcgatgtaataggcatcagtaggatcattcttattttcttcgtaaacgtcatgaaatcgtttagtgtttttaggattaatgacatcagtttcaagattaattttttgtaaatcttcgtcattggcaaagaaataagcagggtgaaagctatagattgaagtggcttccatgccgataattactttgtcatagctgttctgtttagcaagttgaagaattatctttttgacctcattagcaccaatcaggtcattagaaaaagattggttaagtaaaggtttttgataattttctgagtcagtaatagcgacttgaagatcttttgaactaacgtcaattccgataaaaagtttcattgagaatggcctcctttctagcaaatatttggtcatagatcgatcatcacatgttagtccctaattacagattctaagacaatctcgcaaaatataagtattcataggttcaagctaaaaagctgcgactgaatctgctctgaatcagtaatagccagaatcgatacagcatgtgagtaagtcattagtaaaactgcttgggcggcagactaaaaaagtagtcaaagctacagaaggaaacaacctataccaattgaccaaggtcaatgacaattagagactagcatctgatgatcgaataaacaaactaaaagaataatcattatcactgatttaatttatataatacgatttaatttatataatacgagaaggatatgaacatggctttatcaatcaggccatcattgaaaaatatgctccagcagataagaattattctatttatatgagtggtccagctgcgatgattcattttgtaaatcaagaaattaaaaagttagatcttcgtccagggcaagtaagacaagaaatgtccggttcagtaaatccatactttttcaagaattatcctgaggaagcaaagaataagactttcaacatgacagttaaaacccgtgatcaaatacaagttattccagcaagaagtgatgaaagtttgctggtggcaatggaaagagcaggtattattgccccttcatcatgtcgctcaggcgtttgtggtgcatgtcgttcaagagtagttaatggaaaagtatttattccatttcctggacgtcgtgcagccgatagtgaatacaactatgtcaacacttgtgttacatttccaatttctgatttaacacttcaagtgccagttcatgactacgcaaacatgttaggttaaaagtcaagactgaaaataaaattttttttgcgttatattatctatatgttgtatttgatagttaagcagcaataccaaatgtagaaaaagaggatttaaatggcaactttagagatcaaggatttacatgtagaagttgaagacaaagataaaaaaacgagtaaaaagattcttaaaggcgtgaacctaactctcaagacaggtgaaattcatgcaattatgggacctaatggaacaggaaaatcaactttatctgagactatcatggggaatcctcgctatcacataacgcaaggcgatattttgctaaacggtgaaagcattattaacatgccagttgatgaacgcgctagaaaaggattatttttagctatgcagtatccagcagaagttcctggcgtgactaatgctgaatttttgcgggtagcaattaatgctcgccgaccaaaagatgatccgatttcagtgatgacttttttgaatgaattagataaaaatctggatttgctagatatgaaggaagccatgaccgagcgttatctgaatgagggcttttctggcggtgaaaagaaacgtaacgaaattttgcagatgttaatgattaaaccaagttttggcattcttgatgaaatcgactcaggtctagatattgatgccttaagagttgtatcacggggagttaatgccatgcgcggtgacaactttggtgctttaatgattacacactaccagcgtttgcttgattatattgtgcctgacgtggttcatgtcatgatggatggacgtattgttaaagacggtggaccagatttagctaaaaaacttgaaaaagaaggatatgcaggtcttcgcgatgaacttgggttacatattaagttagttgatgaaaattaggggggaaaacgtcaaatgttgagcaaagaaaacatacttgtctcatcaaaggaaaacaacgagccttcctggttaactgatttaaggactagttcttttgaaaagatgcataaactttcttatcccaaaatgcagcgtttttcctatcaagattggccgttgattgctaaagaagattttaagtggcaaaaccaacctgacttttttataaaaaaagagaatcatgatcttcttaacgataagggaatcatcttatgcgatctttttacagcaataaagcaatatccagatttagttaaatccgcattagcttccgttattaaaaatgatgaagataaattaacggcttatcattatgcgtatttaaattcaggcttatttctttatattcctaaaaatacagttttagccgaaccaattacagttactttgaaccctacgcaagatccatatatttcacatttattgattgttacggaggataacagtcaagtgaaattcttggaagaaattcaaaatgaggataaagcagttaaatccgcaaacttaatggtggaaatcgttgcacatccaggtagtcatgttgaattttcatcccttgatgaaatggataaggatacaacgctttactttaatcgccgtgcaagaattgaaaatgatgcacatgttgaatgggcaattgcttttatgaatgactgcaacaccttaggcgatttggattcagaattaattggcgaaggcagttatgcggattctaaggcaattgcagttacaactggtgatcaaagagtcggtattaacaaccgagtaaccaaccgcgggccacattcaactggtttgataaatcaacgtggtgttttacttgaaaattctcaactaatttttaatggaattggtcagattgttcatggtgcacatggctctaaggctgatcaacaaaatagagttttaatgatgtctgataatgcacatggagatgccaacccactgcttttaattgatgaaaatgatgttattgctgctcatgcggctagtgtgggtcctgttgatcaaattcaaatgaattatttaatgagtcgtggtattccatatgatcaagctcaaagattggtaattcgcgggttcttaggggctgttcttgatgcaattcctaataaggaagttcggcaaaagatgattgatattttggaaaaaaaattaattgatggacaaactagacgttaagaaaattaaagcagattttccaattcttaatcaaaaaattaatgatgaaaaattgatctatcttgataatgcagcaactagtcaaatgccgttagttgtagaaaaacagattgaacattttactaattttgatcgcgctaatgttcaccgcggtgttcatactttagggctaagggctacacaaaaatatgaaaatgcccgtcaaaaagtagctgactttattggtgccaaaaatgcaagtgaaattgtatttactagtggttgcacagatagtttgaacttagttgcggcaacttatggtgagcaaaatatccaagctggggatgaaattgttgtttcaattatggaacatcatagcaattttttgccttggcagcagattgctttaagaaagaacgctaagttaaagtttattgaaattgatgctaatggtcgtttagatctggaagatgcaaaaagtaaaattactacaaaaactaaaattgtagcgattactcatgtaagcaatgttttggggacaattaatcctattgcggctttaacaagcttagctcataaaaatggcgcgattgttgtagtagatggcgctcaagccgtcggacactttccggttaatgtgactgatttagatgctgacttttatgcattttcaggacataaaatgtttgcgccaactggagtaggtgtgctttatggcaaaaaagctctgttagaacaaatgccgccttatcgttttggtggtgaaatgattacaaatgtaactagaaaaggagttacctgggcacctgtgcctcaaaagtttgaagcaggaactccgaatatttctggcgtgatcggcgtaggtgccgcaatagattatttaggaaagttagatttaactttaattcaaaaacatgaggatagtttaacagcatatgctttaaaagaattatcaaaaatagatgacttagtggtgtatggtccaaaagactgcagtaatcgtactggtgtgatttcttttaatttaagaaaaattcatccacatgatttagcaacagcacttgatttaaatggtgtagaagttagagcagggcatcattgcgcacaaccattgatggaaagccttaagacagaatcaactgtacgtgctagtttctcaatctataatacaaaaaatgatattgatcaattggttagttcaattcaagaagcaaaggagtttttcggtgagcttagataaattaaaaagtttgtataaagcagttattctcgatcatgctcaaactccacgcaattttggacaacttgctaattatactaatgaaacgactgtttataatccaacttgtggtgataagattcacttaactattttggttgagaatgatcaaattaaagatattgcttttgatggggaaggatgcactattagtaaggcttcagctagtatgatgacccaattggtaaaaggaaaaaatattgaacaggctattagtttttctaggatattttcagacttagcagctggcaaaaaacgtagtgaacaagacatgcaaaaactagaagacgctcaagtcttgataagtattatggaattcccggcgcggattaaatgtgccaccttggcttggtggggattagatcgagcattacttggtaaagaaaacgaggatgaggataatgactaaagcagaagaaatagttaaagatgaagattatcaattcggctttcatgataatgtaaaaccaaaattttcaacgggacatggtttaacagaagatgtaattagacaaatttcggctgaaaagcatgagcccaagtggatgttagattatcgattaaaggccttccatatttatgaaaaaatgccaatgcctagttttggtcctgatctttcgggtttagacttagatgatatgctttattatcaaaaaatgactgataaaaaatatcgtgattggaatgatgtaccacaggatattaaggatacttttgaacgcttaggtgtaccacaagcagaaagaaaatatttagctggttcagctgcccagtatgaatctgagatggtttatcacaagatgaaagagcaatttgataaattagggattatctttacagatactgatactgcattgcaggaatatccagatttattaaaaaaatattttggcaaattagttccaattgatttaaataagttttctgccttaaactgtgctgtttggtcaggtggcacttttatttatgtacctaagggagttcaagtccctgcacctgttcaagcttactttagattaaatgcggaaaattctggtcaattcgaaagaactttgattatcgttgatcaagatgcacaccttgattatgttgagggatgtactgcaccacaatattcatctgactctcttcatgcggctgtggttgaagtaaatgtgttggacaatgcatattgccgttatacaactatccaaaactggtctgataatgtttatagtttggaaactaaaagagccgttgctggcaagcatgctacgatggaatgggttgacggaaatttaggtgccaaggtgaccatgaaatatccgagcgtttatctaaatggtgaaggagcacgtggtaccatgctttcgattgcagtggcacaccacgggattcatcaagattctggagcagggatgtttcataatgcccctaacacttctagctcaattgtttctaagtcaattgccaaaggcggtggctcaactgattatcgaggaagtgttaagttttctaaaaagtcggacggttctaaggcgcatgttgaatgtgacacgattattatggatgatcaatcatcttcagataccatcccaactaatgcgattgaaaactcaaatgtggcgatggaacatgaggcaacagtttctaaaatttctgaagatcaattgtattatttggaaagtcgcggtatttcagaaagaaaagccactgaaatgattattatgggatttgttgaaccgttcaccaagcagctgccaatggaatacgctgttgagcttaatcgattgatcagcttccaaatggaaggagcaattggttaatgttagaaatagaaaatttatctgatcaagaaaaagatgtttaccaggcattaaaagatgtaattgatccagaattgcaagttgatattgttgacttaggcttgatttatggcattgaggtaaatgatcatctttgccagattacgatgacactaactattatgggatgtcctttgagtgaatggctgaataacgaaattaccaaggcagcagagagcgttgcggaaatcgatgattgtcaaattaaactggtctggtatccgcaatggaatccaaatatgatgtcgcgtattgctcgaatgacactaggaatccatggataggagcaccattgatggaaaatcatagttttatttcatatgctaatggtaaatcgctagctgagattaatagtacgattgcggttcctaaaactaagaatttctttagaatgctttttgcttatacgggacctggagcattagttgctgtaggttatatggacccaggcaattgggctgcttcaatcaatggtggacagagctttaactttttactgatttctactattttaatttccagtttaatggccatgctgttgcaatatatgtcggctaaattaggaattgttacgcaaatggatttagcgcaggcaattcgtgctagaactagtaagagattgagctttattctttggattgtaattgaattagcaattatggcaacagatgtggcggaagttattggtgcagctattgccttaaaccttttatttaaaattccactagttatagcaacatttatcactatttttgatgtgtttctactattattattgtcaaaggttggtttcagaaaaatagaggctttgatttcatgtttgattatggtgattttatttgtttttgcctatcaagtcatgttagcagagcccaattggagtaagatcttcttgtctgtttttccgagtcccgaactagttgcacaacatcccgtggttaatgggctttccccgttaacaggtagtttaggtattattggtgccactgtgatgccgcataacttttatttgcattcttcaatttgccaaacaagaaagataaatcatcatgatccagatgatgtcaaaaatgcagttcgttttactacttgggattcaaatattcaacttattctagcattctttgttaacgtgcttttgctaattatgggagcagctgtttttaaaagtggagcggttaaagatagttcattttttggactttatgatgctttaagcaatactgcaatgctaagtaatccaattttgatttcagtagctaaaactggaattttatcagttctctttgccatagcacttcttgcttcaggacaaaattctactattacagggactttaactggtcagattgtaatggaaggcttcattcacttgaagatgccactttgggcgagacgattatttactcggctattatccgtaattccagttatcatttgcgttgttatgacagctaacgacacaatttctcagcagcactttgctctcaacatgcttttagaaaattcacaagtcttcttagcttttgctgtcccattttcgattgttccattattaattatgactgatgataaaagaatgatggggcaattcaaaaataggagaagctggtcggtcttaggctggatcagctcgattattttaattttcttgaacttatataatttgccggcaacctttgtttcatttaatataatgcctaagcaagatgccaagattttcgcttatgctattattgtactgattattttattgctggcttggacctgctgggatatggaaaaaagcaaaattagacattaaaagcatttcataataggagaagcaatgtaataaatagtttagatttcattttagcaagtgtaatagcttactttttattatgtaattagatctaaaataaaatcaaaaaatctgaagaaatttaaaatggaggaaaaactatagaagccaaaaatctatttgatactaactttggtaaagttccccaaatatatttagggagaaacaaagtagtcgaaaatgtagttgaatcatttgaagatgttatcaaatatcgattatttacgggatgcgtggagtaggaaaaatttctttattgtctgatattacatcaaatttaactaaaaaaataattcccggatttaaaattgaagtgcaacactaagtgttaaacaaaaaggccatgaagacctaaacttgaagtgacgaaaaatcaagaaaggaagatctttatgaccaattcaaattctagcatttctaagcactatcatcaattaaccagcgtacaacgtggacaaattcaagcaatgctggattccggcataacttcccgtactgttatcgctcaagaagtcggctgccataagtcgacaatcagtcgcgaaatcaaacgcggaagtgtcctgcaaagagacagcagctatttattgtatgagcactattacgctgatactgcacagatttattatgagaagcgtcgcaaaaactgctatcagcgcaatccattgaagcattatgctgtctttttgagaatgctctccagacgctttaaagctaaatttgatgccaccagcatcgatgagttcgttggtgaattcaaaaggactatgccaggctacccttgtcccagcacaccaactgtctatcgctatattgatcagggcttgctggacataagcaatattgatctgcctatgaagctcaaaagacgcaggaacaagcgtcatcacagccatggcggtcacgctttgcacaagaagcatcttggcaattccattgaacagcgtcctaaagagattgaagacagaaaagctccgctgcactgggaaggagatctggttaaaggcgtcagacgcaagaatcagcctgctttaatgactttgactgaaagaaccacacgctttgaagtagttatcaagattcctgactatcgggcaagcacatgccaaaggctgcttcaaaaggagattgacagacatcctgcctggtttaaatcaatcacgtttgacaatggctctgagtttgcggatatgaccaagatcaagggctgccagatttactttgctcacccatattctccatgggaaaggggcaccaatgaaaactgcaatggtcttttgcgtcaattcttccctaagggcaagagcatgaaagacaagtcaaaagcttatgttcaacaggcaactgatgccattaaccacaaatatcgccgaatcctccaatatcacacagcagaagaactcttcaagcaatatatttcctcatagcctaactgttgcacttaatttgacaattcaggtaaaaaaataattggatagttgtatatttggcaatgatttactagaaagccttattcaaagtatttatcgtgaagcaaacacaaaaaaagcctcttaaagaagacagaactctacacgtcaatctttaagagttttttttatttttgaaagtattgtttaactaatgaaaagttattactgttggctgctattaaatcaatagttgtttgctttgataaatatttttttaatgttcgcttgcaaataccaaaacctatcatgaacttgtcactgacaaaaacaacatgttgaaaagatctctgaacctgtttcagaaaagtgaccacggggcgtggcaaatctgcataccaaattggtgatactaagattagagtattgatatttgattcaagtttaactggtttaatagcaacattaatgtgccgaaaacgttctatttttgcctgtgaagttaactcatgatatttattaggatacggattaactggaataataggtgttgcattaaccccataataatgagcaattcttttagctaaacgctcattattgccactgtttgaaaagtagactatttgtttattcattttaagtcgcttcacattaatatgtttaaagattttctttgaagaaagcggcagctttttcaactgcttgatcaacgtattcgggtttatcatatagatcaccgtgagtagcaccttcaatagtgaatagttctttgttagttgaagctgcttttttgagcagatcttctgagaaacggaaagtgtcagcgttgctacccgcaatcatcaaaattggttgagttgagtagcgatcagcaaacaagaaagtggagaagtcagtcattttatcaattgacatcattgataccttgttagttgaacgaggatgttgaacacgtggggtacgataatattcatgagcttctactaaagtattaggcatcccttcagttacttcttctggaacgaaagttccataaattggctcagcaccattagcttcacgagttctttgattagaagcttcttcaagtaaggctaattgagtttcaactgaggtttttccgtcaaaaccgtcacgaatccatgatgctggatcgctcatacttacagctacaacagctttaattcttcggtcggtcatagctgtatgcattgagtagccaccgccagcacaaatacctaactgacctaaacgattattgtcaatgtatggcaaagttgttaaataatcgatagcgcattttatgtcttccacacgttcataaggagcttctaattgacgagggttgccaccgctttcaccttgatgtgaagtatcaaatgctagggcaataaagccatactttgctaaccgtgagtcataattagttgcaatttgttccttaactgcaccagcgggagatgcgattgagaaagcagggtattgcttgttttcatcaaaattatctggaaagaataagataccagacatgtcgtgttcgttgtttttaaaagttactttcttttgcatagttgtagtctccgttcatttattgttgcttattttggttacgattaagtaaacacttgattttattataataaacgaatgatcgttcactgtaataataaaaattaaagtgctactttttaatagcactccaagctaagttaattaatacatcaattctttcttcagtaaaatctatttctcctttgaaatgacgcttagctaattcggtaattggtggctcaatgtaggcaaataataaattagcgtctacatctttaaaagttccctcctcttggccttttttaactaattgatacattggagtaaaataggtgcttgcttcgcgctcatctaattcagtcatataaggcgagttagtgaattgttgcaaaaagagaaaagcatcctgattatctaaaataaaatcaatatagttacgaataaccttagctaggctagacttagcatcatcatttgttgtatcagtaaacattttggcgctcatttttttcttagtatctaaatacaattttttcaacatatcatctttattcttaaaataaatataaattgttgaagctgaaacaccggcatgtttagcaattttcgacattgatgttgatgaaaaaccttctttatttagaagtagaattgttgcttcataaatagcttcttttttgtgttcatctttgtatcgcatatttgtataataaacgatcattcatttatagtcaagcaaaaaattaaatattttcaatattagtaattggttctcgttaaacaggctttatcctacttgcaaaacggaatgaacttggaattatctagcctacaagtttgaccactttgaaaaccatgtgatgtcatttttagatgaagaagaatattatgaattaaagaaaaaagaaatgcttgatgagaataaacatctgataagatagtagtaaaaaagctgtggagccgaatagatgcttgattatagacaattgaaagaacggtttgctcacaatgctaaccctgaatgtgctagacaaatgaaaaatatatgcgaaatcatggttcgtgattttattgagtaaaatcagcaagagttggcaccgttgtcaattcgtgaagggtcaaagtatattgagcatcgttgctttgtttagtaattccaaatcaaattgagaggataagtaaatgtttcaacagatgaagtattttattgcggtggttgatcgacataattttacccgcgccgccgaagaaaataatatttcccagtcagccatttcccagcaaatcaaggagcttgaaaatatgcttgatgttaaattgtttgaccgaaagggaagaagttttgaactgacggcagctggtgaattcttctaccaacacgccaaagaagttgttaaaacaactaatgaattaattgatcagacacaaaaaattggtaaattaccaatcaattatgaattacgtttaggctatttatcgaattttggtactaacgaatttttgcatactgttgcccatttttcgcaaatgtatccagaagtcgaggttaaaatcaaaagcggaactcatgaacagttatttgagttattaaaacatgatcgaattgatctggctttctccgatcagcggcgtgctttatcaaacgaataccacaatgaattcttaactgaaactgattttatggtagttttaccattgaactatccagataataaccgtattttagcaacgcaattagctgacttatcatgcattttaattgttaatgaaacacaaaaagcggctgaggaacaatattatcgggatgctttaggaataaaaagccggtttttaacggttactactatcgatgaggctcaaataatggtagcagccaatcaggggtactttattgttaataaacgaactcaagcgatgattaataaagaaactgttaagacaattccgctttatgccggtgatattccccttcaacaaaattactatacatattggaaacaagataattcaggcttttacattgaaaagtttgctgagctattaaagaaacaattttaagaaatagactatgaggtaaaaataaacgtcaaaaagaagcttcttcactaatttttggcgtttttttgtatataagaatttagcttgataagttttacttatgattattaattgtaaatgtgaattggtttagttattgaagatcgttatgatatagacaattaatcaaagcaaaaagagaaaaactggttttgataaggctttgatggaacagttattagcaaaggacgatttgatgacagataaagaggtaattattgacctttaccgccaggaaaatcgggcaatcgtagataaagacattgaaaccttgggtcagattttagattcaaccatggtattacaccacatgactgggtatgctcagcccaaactagaatggatcgatcaaatccaaaatggtgagcttaagtattattcttctgatgaggagcagatctcagacattcagattgctgggaatcacgctagcttaattggtcacaataaagttaaagctagcgtttggggaagcccagtaagtacattgttgcttcaaatgaagatggaatttgcgaagattaacggtaaatgggcgatcactaagcagatcgccagcacttattaaaggaggtcaaatgttatgaagaatattttaattattggagcaacaggagcattggggactacaaccactcaaacagtattaaatgaaacggacaatcacttaacattatttgcgcggtcagccaatcgaattaatgttattgatcctcaacgagaaactgtaatcagtggggatgtattaaatgatcacgatttagacaaagcgttggtaggacaggatgcggtgtttgcagcattaagcggtgacttagttgcctatgctaagcagattgttgcggcgatggaccgtaataacatatcacgattgatatttattagttcgatgggaatttataatgagattcctgcttcaattggtattagtagtaatttggaaagcaacccaattcttcaatcatatcgggacgctgctgacatcgtggaagcgtctaatttaaactataccgttattcgtcccggctggtttactggtggtccagttaattatgaaattactcataagggcgaaccatttggtggtcccgatgtttcaataaaatcaatcgttgatttggttacaaaattacttaacgatgatgagctttattcctgcgaaagtattggcattaataagccgagttaaatttttacttgccttgtagtggactttaaggtttacagtttgagttaatacaatgtaaaaataattagaggagcgaatttagatgaaagcagctgtatttatggaatctggtaagatggaagttcatgaggttgaaaagccaataatccaaaagccaacagatgcgattttaaagattgttcgtgcttgtgtatgtgggtccgacttatggtggtatcgtgggattactaatcgtgaaaaaggatcattagttggacacgaagcaattgcaattgttgaagaagttggcgataacgttaaagatattaagcctggtgattttgtaattgcaccatttactcatggttgtggtcactgcgtagcttgtttagctggtttcgatggcaactgtgttaaccaagaagctggcagtaatggtggttaccaaggtgaatatcttcgttttactaatgctaactgggcattagtaaagattccaggtcacccctcagattacacggacgagcaattaaacgatcttttaactttagctgatgtgatggcaactggttaccatgcggctgcaagtgctgaagccaaggaagacgatacggtcgcagttatcggggatggtgctgttggcctttgtggtgtaatcggtgctaaattacgtggtgatgatgcagttaagaaggttcttgaatgtgttggggccgtatctgctattgaacaagctggcaagttagctcgtccaggcgcaattgttggtcgagtaggtgttccacaaaccgaaccatcatcaaacacgcttttctggaagaacattggtcttcgcggaggaattgcttccgtcactacttatgatcgtgcgattcttcttgatgctgtattaaaaggtaaaattcatccaggaaaagtctttactaagcgttttagtcttgacaaaattcaacaggcatatgaagtgatggataaacgtgaagcaatcaagtcattaattatcgtcagtgaataatttaatcgtccatcttaagataaggagtgtagtgaatatgagtacaatttttatcgttggttcgtcatccggaattggcaaagcaacagcaaaattatttgcagaaaaagggtgaacggtgattgctactatgcgttcacctgaaaaagagaccgaattaacatcctatcaaaatgtttttatttatccacttgatgtaacgaagcctgaacaaatttctcagacagtctcggaagttcttaaaaagcatgaggtggatgttttgttcaataatgctggttatgggatgaagtctcgctttgaggacatgaccgaagaagccatgcagcagtccttaaacacgaacctgctgggaatgatctgtgtcacccaaaaatttatcccatatttcaaaaaaaagaaaagtgggttaattttgactactacttcccttgctggagaaatgggattagctctagatggtatttatgcagcagataagtgggcggtgactggagtatgtgaaatgctttatcatgagttagcgccatttggcattcaggtgaaaatcattgttccaggggttgtgaaaaccggttttaagatggagacattcgcaatgccgggatttgatcagttactaaaaaatcaaacaaaaatgttaatgccagacacagatagtttagaatcgcctgaggaagtggctcaagatatctttaaggctgtcactgataaggatcgtgatcggatgtgttatgttactggtaagattaccaaagaattatatgaaaagcgtcaaaaacttggtgatgaagcatttcgcagatacattcgaaaccaattgatgtcaaaacgaaaagtataaaattaaaaatagtttagaacctgaattgtcaaattaagtgcaacagttaggctatgaagaaatatattgcttgaagagtttttctgctgtgtgatattgaaggattcgacgatgtttgcggttaatggcatcagttgcctgttgaacataagcagctgacttatctttcatgcttttgcctttagggaagaattgacgcagaagtccattgcagttctcattggtgcctctttcccatggagaatatgggtgggcgaagtagatctggcagcctttgatctcggtcatatccgcaaactcagagccattgtcaaacgtgatcgatttaaaccaggcaggatgtctgtcaatctcattttgaagcagcctttggcatgtgcttgcccgatagtcaggaatcttgataactacttcaaagcgtgtggttctttcggtcaaagtcattaaagcaggctgattcttgcgtctgacgcctttaaccagatctccttcccagtgcagcggcgtttttctgtcttcaatctctttaggacgctgttcaatggaattgccaagatgcttcttgtgcaaagcatgaccgctatggccgtgatgacgcttgttcctgcgtcttttgagcttcataggcagatcaatattgcttatgtccagcaagccctgatcaatatagcgatagacagttggagggtagcctggcatagtccttttgaattcaccaacgaattcatcgatgctggtggcatcaaatttagctttaaagcgtctggagagcattctcaaaaagacagcataatgcttcaatggattgcgctgatagcagtttttgcgacgcttctcagaataaatctgtgcagtatcagcgtaatagtgctcatacaataaatagctgctgtctctttgcaggacgcttccgcgtttgatttcgcgactgattgtcgacttatggcagccaacttcttgagcgataacagtacgggaagttatgccggaatccagcattgcttgaatttgtccacgttgtacgctggttaattgatgatagtgcttagaaatgctagaatttgaattggtcatgaagatcttcctttcttgatttttcgtcacttcaagtttaggtcttcatggcctttttgtttaacacttagtgttgcacttcaattttaaatccgggaaaatagtttagaataatattgactttattaaatttattatgtaatatacttactaaataaatggtatgaataaccactaagaataggaaattagctttaccttaactagtcagcgaacccaaattagtgtgagtggggatagaaaagtaaagtgaaagtagcctaggagtgcttgaagtgagagtaattgtaactttaggagggcgcgcccgttatagcgtcaacgtatctagttttgctatgtatggggtaagggaataatagtaatattattctaaaataaggtggtaacacgcgtgatagcgtccttataagctttatgcttataaggacgtttttttgtacctagtattaatataatttttatcgaaaggaatattaaaatgaaaaccaaaaaagcgagtattaggcggtcaatgattatcgcatcacttattttcggaatgttgtttggagcgggaaatcttatttttccagttcatttaggtcaattagcaggtagtaattggctaatagcgagtagtggctttctgctttctggtgttttactgccattaatggcgctgttggcaattagtattaccaagtcgaatgggatctatgatcttgcattgccgaatggtcgttactatgcacttatctttttaattcttgttcacgctactttgggaccactatttgcaactccccggacagccactgttccttatgaaattggaattgccccttatttatctaagtcaactaatactttgggattattaatctactcagcaattttctttagtttagtttatcttttttcaaatcatgagggaaagatcactactttaatcggtaaagttttaaatcccttgttcttgttattattattccttatcttcttattagcattcattaatccattgggttctagaaatactgctgctataactgcttcatatgcaaggcatgctttttccaatggctttttgcaaggttacaatactatggatggcttggcagcattagcctttggaattactattattactgcaattagagaattaggtattaagaagacacggcaaatttcacttgcaacggctaagagtggttttctcggaattgcgggagttgcaattatctatttagctttaatttggctaggcgcgactagtttgcatcaatttaaattagcagcaaatggtggaattactcttgctcagatttcacaccattacttaggaactgctggagatgcaattttagcaactttagcaactatcacttgtatgacttcagcaatgggattagtaattgccttctcgcaagatttccatcgccgttttcctaaaatttcgtatcgaacatttttacgaatcaattgtggattatcatttctatttgctaatttaggactcaaccagattattgcatggtcaacgccaattctgatgttcctctatccgttagcaattaccttaattattttagggctactttcaccactgtttaagaatgaccggctcgtttaccggattacaactgagcttaccttaattccagcattctttgacatgttaaatgcgttaccagctgggttacatgaaagtcgattattacagacactgcttggttttgcccaacaatacttcccatttttcaatttaggctttgggtggctgacctttgggattgcaggattaattcttggattgatttgtcatgtattaagagtaagaaagcgtctaggactaattagtgaataatatgtattcatcggtcgtaaaattaaatacattaaaaaaaggattaactttgctcatactgtaacttaaggtgcagtatgagcaatttattagaaattatatagatgcaatttatgaatgggattgaatattaatggaaagcctaataagataaactcaacttatcagcaaatgacaggtgtaagagagctttatatgaaaaagcatgttcaagtcctaaatattattggtgatggtgacagtacttataaagttgaaaagattaatggcaaaaatgcacaacattcaaaactgcatgaaaatgctcaagttgatcaagcattaattaagtttttatggaataaatagagttacttaatatatctattgtaaaagaataaaacaggtgctattattacagcataatattattcaatgaaagaagggtttaggttgcgcttttaatcttgtaattagcatcatagtccaaatagtaatttatattgtggagagactatgtacttttagcaggattaaagcccaggccttcgattattacaattcattttcgtaaggagagagtctatgcttgctagaagtatgggctctttttgtgcgaggtggttggatgagtaatcttaagattagtaggttatcttttgaatatgaagacagcaatagatatatttttaaaaatcttaacctagaccttgatactgattggaaactaggtttgattggtcgaaacggaagaggtaaaactacttttttaaacttactgcgaggtaagtattgtggaactggtcaaattcaaggtaatgctagcttttcatattatcctgtaaaaattcaaaattctaaaaacattactttttatgagttacaagatcaggttgcctttgaacaatggaagctggaacgagagttaactctaatgaatttagatcccgatttattatggcagcctttcaataccttgagtggtggtgagcaaactaaaattttgctagctttatcatttacagatcaagattcttttcctctaattgatgaaccaactaatcatctagatgagacaagtcgtaaacaagtagcagaatatttaaatgggcatgatcaaggatatattgtagtcagtcatgatcgagattttttgaatcaggtaactgatcatatattagcgattgaaaatacagcgattcatttgtatcaaggaaattattcgacttatgaggtaactaaaaaaaggcgagatgattttgatcgtgaaaaaaataaaaagcttacagggcaagtgaaaaaattgaaccaagaaaaggtacaattccataattgggcagctaaaatagaggcacgtaagaaattagggatgaaaacacagcatattatcaatcgtcgaaccagattaaataagggagcgatcggacatcaagctgcaaagatgatgaagaagtcgattaatgcacgcaatcgcatggataagaggattgcggaaaaagaaggaatgctaaagaatattgaaaaagttcctactctgactatgaattttcaggcagattatcatcgtgagattttgcaacttaatgatcttagcttgcaactaaaaaatagtagagaactatttaaaagcttgactttgtctttgaataatcatgaaattattgctattgaaggtaaaaatggttctggaaagtcaacattaattaagcatttactgggtatctctcaaaatctaattgccaaaggtaattatgagctaattgaaagtttgaaaatctcttatttaccacaagaatttgtaatgtatagcggatcattaaaagactttgctaaaaaatatcatttgtcttatgaagctttgttgagcaatcttaagaaaatgggatttgcgcgtgctgattttacaactagaattgaaaaaatgagtatgggacaacagaaacgagtagctttggctaagtcattgacagaacctgctaatttatatttatgggatgagccagcaaattatttagatgtattcaatcaagatcaattaattaagcttcttaagagtgtgaagccaacgatgttactaattgagcatgatccttacttcattacatcggtagctgatcagcagattaaattaacaaattaactagatatttctataaaataatcttattaggaaaagtaaaattataagatatattgagactgtaaaatagtttgtgtaaggatgaatgattccttaaatttatttctttaaacattagaaaaaggagttcctttctcgtatgattggtttgaacaaaaaaaacacatacagaaagaagaactccttcatgaatgattttaccaaagattttgctcaagctctattcaatccagacaaaataaatgatttattgcgcaaagagctacaacaggctgttaataacttgctagaagctgaattgactgcctttctaggctatgatccctatgccagaaatggctggaatactggcaattctagaaatggtgcttatttccgcaaggttgatacgcagtttggaccaattgaagtgcaagtgcctcgagaccgcaacggtcagtttcatcagcacacgctgcctgactacaagcagcactcggatatcttggaaagcatgattatcaagctttactccaagggcgtgaccaccagggaaatagccgatctaattgaaaagatgtatggcagccattacagtccagctcaggtatcaaatatttccaagcagatgattccaaaggttgaggcttaccacaaacgcaagctaagcgacaagtttttctgcgtctatttggatgcgacataccttcctttgcgccgagaaacgtttgagcgtgaagcagtctatattgccattggcattaaacctaatggacataaggaagtcattgactactgcattgctcctagtgagaacattgaagtctggacagagatgcttcaaaacatgaagtccagaggcttgaagcaagttgaactctttctttctgatggtgttgttggcatgaaaacagccttggccaggacttatcctaaagctcattttcaacgctgtttggttcatgtcatgcgcaatatctgcgctaaagtacgcgtcgacgatcgtgaaaagatcatgaacgaattcaaacaggtgcatcaacagacaaacaaagaagaagccacagctgtcctgcatgacttctataccaaatggggcaaggtttacagccatgttatcagaagcttgaaagacatagaaccagatctgctggtcttttataactatcccaagcagatcagagcttcaatttattcgactaacatgattgaatcatttaacaatgtgatcaagcgcaaagctaagcctaaggcagagtttccaactgaacagtcgcttgatgcttttattggtattcaggcaatgagctacaatgaccgttatttcaatcgaattcataaaggctttggtcaggttcaggacaccttagaatcctactttgattaaataaataattaaaaaatcaatttacgagaaagaactatttacacaaaagatttgacagtttcgatatattggttggaaagttcgattatcataggcataataatatagagatgataaacatgaaaaatgaattttgtcacgatgaaatgaaatgtcagaaaaattgtccttgtgcagataaggatggcatttgccactgcaaaatggtaaatagtaaagaatgtgtttgcaagagtcattgtaaggaacaagaaaagtaacaaaagagcgccagtagatttagtttaagtttactggcgctcttttaaataaaaatcacataattttgttgcgtttaactggaaaaagaaatgaaataactggaactattagataaagaatcattgctagttttgcattgaataatgacagaatgatcaatattacatttaaaaataaagtaaccgtcatttttctaataaaggagcggctaataataatccgcatgatttggaaatagcgcgcagtatttttagcaccaaaatattgaattagatattctaagattttggcaattaaaaaaacaattcccaagttagctacagcgaaagaagaattttcagccataatccatttagtcatgactggcagaagtgataaatcagctaaaaaaaagaagtctagaatagcaatcgcttttgaaggcttgaaaatatagtatgaaaaagataaatgtagatcataccagaaatctgccacaataaaaaaagtgattaaaaagacagcaatattgctaatgaattgctgataatgaatttcatgcagagcaggttgaatttctaaaacaataattgtaataataatggccatcactccatcgttaaaggcttgtagactttcaggctctttcttttgggcctcagctaattcttttttgacattttttaatttatctttttcttggtctgagaattgattaaaattgtgtcttctgggatttcgtggcatggctattcctccaattaaattaatttattaatcaataattactttagcataatttttcacaatcaagctaaaaactgattcttataaattaatatcatattttgctttttggacaaatataaagtatgataaacagcaatcaaatattaggaggaaatagtagaaactgtcaaatcttttgtgtaaatagttctttctcgtaaattgattttttaattatttatttaatcaaagtaggattctaaggtgtcctgaacctgaccaaagcctttatgaattcgattgaaataacggtcattgtagctcattgcctgaataccaataaaagcatcaagcgactgttcagttggaaactctgccttaggcttagctttgcgcttgatcacattgttaaatgattcaatcatgttagtcgaataaattgaagctctgatctgcttgggatagttataaaagaccagcagatctggttctatgtctttcaagcttctgataacatggctgtaaaccttgccccatttggtatagaagtcatgcaggacagctgtggcttcttctttgtttgtctgttgatgcacctgtttgaattcgttcatgatcttttcacgatcgtcgacgcgtactttagcgcagatattgcgcatgacatgaaccaaacagcgttgaaaatgagctttaggataagtcctggccaaggctgttttcatgccaacaacaccatcagaaagaaagagttcaacttgcttcaagcctctggacttcatgttttgaagcatctctgtccagacttcaatgttctcactaggagcaatgcagtagtcaatgacttccttatgtccattaggtttaatgccaatggcaatatagactgcttcacgctcaacgctcaaacgtttctcggcgcaaaggaaggtatgtcgcatccaaatagacgcagaaaaacttgtcgcttagcttgcgtttgtggtaagcctcaacctttggaatcatctgcttggaaatatttgatacctgagctggactgtaatggctgccatacatcttttcaattagatcggctatttccctggtggtcacgcccttggagtaaagcttgataatcatgctttccaagatatccgagtgctgcttgtagtcaggcagcgtgtgctgatgaaattgaccgttgcgatcccgaggcacttgcacttcaattgggccaaattgcgtatcaactttgcggaaataagcaccatttctagagttgccagtattccagccatttctggcatagggatcatagcccagaaaggcagtcaattcagcttctagcaagttattaacagcctgttgtagttctttgcgcaataaatcatttattttgtctggattgaatagagcttgagcaaaatctttggtaaaatcattcatgaaggagttcttctttctgtatgtgttttttttgttcaaaccaatcatacgagaaaggaactcctttttctaatgtttaaagaaataaatttaaggaatcattcatccttacacaaactattttacagtctcgaatagtatgaaaaaaataatcgctaagcctgtgggaatgtttgaattattctatgatttagtttttgtatacgcaatttctcgaattactgcaatgattcatcatcctgttaatggcagtattcctttagttacttttcttcaatttttattggttgtaattgtagtaatgcaaatttggctttatcaagttatctattttaaccgatatagcaaaaatcaatttttagatattggcggtttaggtttaaatatgtttgtagcagtttatctggctaacaatattaatactgaatggcaagttacttttcactattttaatattgcaatggctgttatgatcttaattttattttgtcagtatctatttgtaaaagcagataataatgataaacaagcctttttaatcattttaggaatagaatttatcttaattattgtaggattaatcatcggctaccctgttggaatttatttttgtataagtggttatattgttggttttattttgccattgtttttaaaagggatgtttaaaactgaacgagtaaatttccctcatttggtagagagagtaagtttaatcgtaattattgcctttggtgaggctatcgttaatttgacaagttatttcaatagtaagacacctttagtttatgctgcttttttgtttttatctttagtattgatgtttgcaagctatgtagttttatcagataaattaattgaccatcatcagataagtaaaggctttgttttaatgtatagtcatattgcaattgtagtagcaatacttttgtcaacagtagcaatactgtatttacaagtgcatgacataaataaaacttttttgtttttcctgattattttttcaatggccttatattatttctcattagctataaatcaagtatataacaagagtgaatgtcgatttagtattcgtaatctgttaacattgctactaatttttgcactaggagtaagttacttatgggttgtgataaaatctaaaataggtatttcaatttacctattaatttggaatttgttatttttcttagaattttatattaaaggcaataaaaatgaattcagatgatcaatttatcaagtgggcgacagatttacaaagtttagctcaagcagggttgcattatggtcatgatgtatttgatcgtgagcgctatgaaaaaatccgtaaaattgcaggcgaaatgatggcagctaggacaggactacctaaagaacaaattaaaacactctttttgggtgatgagggctatcaaacacctaagattgatacgcgagcagcaatttttaaggataataaaattttgcttgtccgtgaaaaaatgactcaggaatggtcattgccaggcggctggaatgattatgaccaaactacagcacaaaattgtgttaaagaggcatatgaagaagcaggtagagtagttagacccgtcaaaattattgcagttcaagatcgtaatcatcataataaaccaattttggccaccaacattacgaaggtattttacttatgcaaagaaattagtggtgaatttaagccgaacgatgaaactgatgcctgtgattattttgcattagataatttaccgaagctttcacttgggcgaaatactgaggaacaaattaccatgtgttttgcggcaaataatgatcctaattggcagactcaatttgaatagaaaatttgaaaaataaataaaaaagttgttgacaacgattatattttgattaaaatagttattaacaaatttaataaatctgaaaacaaagagaaagaagagtaatttagacttaatttacagcgagtctcgttaggtgtgaggagataaatcctaagtttaaatgaaaatcactttcgagttctatttcttaacttaaagtaagaagtagtgggagcacccattatagtgcctacgtatcgtcaagcagttgactgtacgtgaaaggtattgctagcaatagtgatataaataaagggtggtaccacgctcaaagcgtccctcagttacaatttgcagctgagggccttttttgtttatcagggatgttttggaggagagaaaatgacagatcatacatcgaaaaaacttacatggaaaaattatctcgttgttgcttccttgctgtttggattattttttggggctggtaacctaatctttccattacatttaggacaactagctggagcaaattggggaacagctgcagttggctttttgatcacaggggttttattaccattattctctgtattagcagtagcaattactcatgcagacggagtatacgatatcggtaagccgctgggtgccggatttgcagtagtatttatggttttaatccatgccacaatcggaccattgtttggtaccccaagaactgcaaccgtttctttcacagttggtattgcaccatttatgccgaagaatatgcaaagttccgctttacttgttttttcagctttattctttttagctgcttttgctttttcttatcatcaaaataatatcttgtctaacgttggtaaggtattaaacccattattcttagcattattattcctagtgtttcttgtagcttttgctcgtccgttgggtaatccacaaactgcagcagtaactgcagcttataagcatggagcattagtaaatggcttcttagaaggttataacacaatggatgccttagcaggcttagcctttggggtcacggttgttacagctgttcgcggcatgggacaaaaagatgctaaaagtgtttcaaaagttgttgctaaatcaggtgtcttggccgttttagaaatcggttttatctacttgttattgatcttaatgggtgcaatgtcactcggacgctttgcagtttctgataacggtggggtagcctttaaccaaatcgttaacgtttatggcggtgtctttggtcaagctttacttgcattcttattgacagttacctgtttgactactgcagttggtttggttgctgcttttgcgcaagactttcataagcattttcctaaggtaagttaccacgtttggttagcacttagttgcttggcatcattcttaaccgctaactttggtttggatcaaatcatttcatggtcaacaccgatgttaatgttcttatatcctttatccatggttttgatcttgctatcagtttgttcaccattgtttaataaggaaggtgtagtttactttttcgtaatcctatttactgttgtgccagccttaggcgatatggtggttgctttcccaagtgtagttagtcaaagttcattcggtttagcagtagcttcacttagaagtcatttgccacttgtcagcatgggcttatcatggttagtgccagcactggtaggtttagcaattggtttagttgtatatcatgttagaaataaaaagacagtaccggttttagaagaagactaaaatttgtgtattttagatgaaggcagtgattgccttcatttttttgcttctgagatgaatagttgtgaatagacatgataaaattaaaatgaaattattttaataaggagaaccacatgcttcaagtacgatacggtattaacttagcaccagaaattaaagaaaataagattgatattattaagaatgagccttttactatttgggatgcaggtgtaataaatattcaaaagcaaaagtactatttattagttgaaaaagacactagttttccaattttattaactaaacttgatgccaagctatttaataatgtttttgctaatgcgattaaaagctatgactttattttgtttaaacagcaacaaaaattagtttcagcggtaaagtccaagcaaatgtctttttacgatactaaaagccaagctagtttaatgctagaaaaaattcgtaaacttatagaggataatcaaagcgaatatttaaatttgattgatgttgtaaaagatgaaaagaatatggtagataagctaactgtaatgtcagcgactatttttgccttggatagtcagattggacaaaattttatttctaagatgattgatgaggttagtacgtattttcctattaagccgcaaaaaccaaatcgaagatataagtatgttgacttagtgccaaaatttgaagatttctctaattttgaaaaatatgaaaataaatcagtaaaaggcaatgaaaagattgttgctaaaattaaagaaaataatcagaaactcattgatcaatatgctaaatatgtaccagcagaaataggatatatccaacctgatcaaatgctgccggattatctaaatcattatttattacgtaataagatccatttagttactaatgatttaggagaagcgatttcttatttatggattatgatatctaacaataaactacatccgctagaaatagagcagattacaaatactttgaaaaatttctatgtatttttgagtagagtaggtcttattcgtaaaactgatagtaaagaaatagggatgaatattgactgggtagttgaagaaattaattcatactccgatcaaagcctggatgaggatttgataaacgacatgatagcggcaattgaagcaaatccgaaaaagattttggaacttgaagatttagatctgtctcctcaggatttgtctagaattttagaaggcttgcgaaaagatcttgagagtcatgataaaaagcagaaaacacgaaaaaagacaatttttgaaaatcaaactcgcaatcgagctacctatgaaattagagtaaaactaaagtcttttaaaccatctacttggcgtagatttattattagtggcaatacgtcagtgaaaacattagaagttgctatgctagatatgtttaatgcagattttggacatatgtttgatttgctgaataaaaaaacgcaggaacgctttgaaaatgcagaaagtatcgctgaagcgaaagattgggatccggctacaggcatagattatgaaaaagctaaggtttcgtattttgaaaagagagataaattattattaacttatgattatggcgatagctgggaattcgaagtagatattaagaacatcactactgatcaagcagctcctaagtgtccaaagatactttctggaaaaggttatggaataattgatgacattggtggtgtatggtctttgcaagattattacgatacgcctaaagataaagtagatcctgaaatgattgattggttaatgggtggagaagcaattgatttagataagtttgataaggaagaacttaatcaaagaatggaacaatataaggaataaatctgcattgtttaagatacccagcgtgtcatgggattgaagtgtttgaattttaattagtaaagtctatttaaacaagtccttatgtacatccttaaaatgcatccctttatacatatcaggggtgctatttttgatagcccaatttgaaattgtatttaaaactggcagaagcgtctttcccttatttgttgatgaatattccacccgaattggcatttcattatattgttttctttcaacgatatcttgttgttgcaattctttaagcgaatccgctagtgctgcatcagagatattttccatttgatcttttatttctctatacctcatagcctttttatgtcctaagatacataacaaccttggtttccatttgccaccaaaaatatctaatgcataatcaacagtacaatagtattcttttggtaattttctttgatacataattaacctcactcaataattctttagtagctaaagctctttttaaaatatgtaaatcttttcagctttatcttactataaaaatgtaagttgattaaagcagaaaggaaaattgatatggcagtaaaagcttatttagaaattacaatgcagattccagcagaaaacagaaaggcagctgcaaaggtttatagtgattaccgtaaaccatttttagaaacaattccaggtgctgaaagtaaggcattacttgtacgcaatgaagatgtgcaggtattgcatggatttgattcaattgaacatgcagaagactatctaaagagtgaaatgtttaccaagcatgtttttccaggtttgaaacctacttggactgctgatccagaagttagaatcttttcagttgtaggatagaatattaaaaatatcaaacggtttagtttgatatttttttatttaggttaagtaaagaggaaaaatgaaaataactaaaatcgatctattatatggtgatccagttgaagataattggcgaccttctttttgccgtatctatactgatagcggaatttatggtgatggtgaagttgctttatcatatggcggagcaaaagaggctgcttttgctgaaatgaaagaattggctcctatgttaatcgggatgaatccattagagcatgaggtcatctggcaaaaaatgtacagaaatagcttctttggtaaaaacgcaggtccggtaatttttggcgctatttctgcttttgatattgccttatgggatattaaaggaaaatattatcatactgcgctgtgggaactgcttggtggaaaacaacgagatcatttaaaagcatatgctagtcagctacaaatggggtggggagaatcaagaaggccagcagcgacacctcaagactatgcagataatgttaaaattgccctaaaaaaaggatttaaagccgttaaaattaacttcttaacatttgacgagcgaggaaagcaggttccatggcaaaaacagactgcttttttatcgaataattatttaaatttagcagaagagcgaataaaagcagttcgtgatattttaggaaaagatggcgaattaattttagaaaatcacgctttaactgataagttatcagctgttcagtatggaaaaatggcgtcaaaatataatattttgtattttgaagaaccagtgaaacctgatcccgatctattaagttatgttcatcaagaaacaggtctaaatattgcttctggtgagagaatgtattctcgttggaactttaagcgtgcttttgatcaaaatagcattcaagttgcgcagccagatatttgcacggctggaggagtaactgaagttaaaaagatatgcgatatggcagatacaagtgagcttggtgtacaaatccatgtagccggaagcaatttagcaactgcagtgtcactaaacttagaagcagcactccctaactttgtgattcatgaatataacgtcaatactgagatgccaaaaatgcttaagttaactaaatatgattatgaacctgacaatggtgtatttacagttcctaacaagccaggagtcggtaatgaaatatctgattatgcttttaagcatagtagggtagttacggttaagtaaaattaaggaatatctctgatattttgctagcaaagaaccactttttgtttctatgcctattagtattaaaaaatacgattaaaacaattacctaagcatttaagttagagtaatcgtttttccatgtatttaaaatttttacatcaatttcttcaattcatttatggcagcatcatagtttggctcatgagtaatttcatcaacaatttcacgataaacgattttaccgttaggatcaagaattcaaacactgcgtgctaaaattccagagtctggaatcaacaagccagttgccttgccaaaggatagattttcatcagacagcaattgcatatttttaactccttcagctgcacaccaattttgttgatcttggatagtgttagtcgaaatagttaaaaagttaacgtcaggaaactgatccattgttttgttaaaagtcttagtttgaatactgcagacaggtgtgttgatatctggtacaacactgatcaaagtatttttacctaataaactatctttagtagcttcttgcttatttttgtttaaaactgtaaaattaggcatttcatcgccaaccttaggtggtgtgccaattaattcaacttcttttcctttaaaagtaactttcatgaaattcctccttttattatcttttaacttaaatatagcaaactcagttcagtaacttaaatatttagcttacagatattaatttttagaatctaaaattttacttttgaattttaacatcttgtattttgaatttaaccacgtatttaaatagtgaattcggaaaggaagacttcttatgttaattggaacttttagcttattctcaataatgatgatgttaaataattggtctatcaatatttggacattgcttatttttattctttcatacgttgttatttggataacaatcaagttaacacaaaatcgccaaattaagaaacgtaatagctaattaataatcttcattcattcgctttatgcatagctaactattaccaatgaatattttttataatagttattttgatttagaataaaacaaagttagaagtgaggtaataatatggcaaaaaatgaagaagaagtaaaagatagcgtttttggttttggcaaatctaacgaagcctttgccaagttttttaagggtaaaagttacctcaaacctttagcagaaagtaaagaagctaagaccgcagttcataatgtaagttttgaaccaggatgccgcaataattggcatatgcacacagtgccacaaattttaatcgcggtagctggtgaaggctggtaccaagaagaaggtaaagctgcacaaaagatgcttccgggtgatgttgttattgtaaatccaaatactaagcattggcatggagctactaaagattcgtggtttgctcacattgctattatggctggtaatagcaagaatacttggttagaacccgtttctgatgaagaatatgataaattgggctgattaatcggaaaattcaatatgtaaattataattaaaccaaaaaattcctcttaaagaagacgaaactttacatgtttatctttaagaggaatttttatttttgaaagtattgtttaactaatgagaaatgattactgttagctgttattagatcaatagttgtttgtgctgattttaaatttgcttacaaatataaatctaatcatctggagtcaattgatattagaaaaaagaataaaattaaaaacaggttagaataatattgactttgtttaatttattatgtaatatacttactaaataaatggtatgaataaccactaagaataggaaattagctttaccttaactagtcagcgaacccaagttagtgtgagtggggataggaaagtaaagtgaaagtagcctaggagtgcttgaagtgagagtaattgtaactttaggagggtgcgcccgttatagcgtcaacgtatctagtttttctatgtacggggtaagggaataatagtaatattatctgaaacttgaaagctaagattaacgctccttccccgcgcctcttggctttttcttatcaaaaataaaaacgcaggatctctctgcgttatactttaagtgtcgacctaaaaagtaaaggagatcctgcgcaatgaacagtatagaacaaatcgacacagaaaatgatactaaatccttaatttcttcatttattaatctacctgaattgtcaaattaagtgcaacagttaggttatgaagagatatattgcttgaagagttcctctgctgtgtgatattggaggattcggcgatatttgtggttaatggcatcagttgcctgttgaacataagcttttgacttgtctttcatgctcttgcccttagggaagaattgacgcaaaagaccattgcagttctcattggtgcccctttcccatggagaatatgggtgagcaaagtaaatctggcagcccttgatcttggtcatatccgcaaactcagagccattgtcaaacgtgattgatttaaaccaggcaggatgtctgtcaatctccttttgaagcagcctttggcatgtgcttgcccgatagtcaggaatcttgataactacttcaaagcgtgtggttctttcagtcaaagtcattaaagcaggctgattcttgcgtctgacgcctttaaccagatctccttcccagtgcagcggagcttttctgtcttcaacctccttaggacgctgttcaatggaattgccaagatgcttcttgtgcaaagcgtgaccgccatggctgtgatgacgcttgttcctgcgtcttttgagcttcataggcagatcaatattgcttatgtccagcaagccctgatcaatatagcgatagacggttggtgtgctgggacaagggtagcctggcatagtccttttgaattcaccaacgaactcatcgatgctggtggcatcaaatttagctttaaagcgtctggagagcattctcaaaaagacagcataatgcttcaatggattgcgctgatagcagtttttgcgacgcttctcagaataaatctgtgcagtatcagcgtaatagtgctcatacaataaatagctgctgtctctttgcaggacgcttccgcgtttgatttcgcgactgattgtcgacttatggcagccaacttcttgagcgataacagtacgggaagttatgccggaatccagcattgcttgaatttgtccacgttgtacgctggttaattgatgatagtgcttagaaatgctagaatttgaattggtcatgaagatcttcctttcttgatttttcgtcacttcaagtttaggtcttcatggcctttttgtttaacacttagtgttgcacttcaattttaaatccgggatttattaatctaattggtctagctaagttaactaaacaagtcaattttaagcgtaaatccaccgtttcattaaccatgattatctcttggctgatgtcagtacattttgctcggctttctttattcagagctaaggatgacaaacgtttttccgttagaactgctcgcaatgtacttaacgatggaagaatcaactggcaaaaactattatgcttgattgcagcccggctcattggctgcttaaaaccatttatcgataaaagacgccgacttgcttttatcgttgacgatacgctgatggctcggtctttttctaaaaagaccgaattgctagctaaagtctatgaccatgacaagcatgagtatttgaacggatatcgtggtttaactttaggctggagcgatggcaataccttcttgccggttaactttgccttgatgtcaaccaaaaccaagaaaaatatgattggagctgctcccattactgctgatgaacgttcaatttctggtaaaaggagaaatcaagctcagagaaagatgaatgatgtaactgtagagttgattagacaagccttacgattaggagtagaagctaaatacgtcttattcgattcttggttttcttctccaagaatgttttggattttaaagaagatcggtttagatggacttggcatgatcaagaagagttcaaagatttattacatttatcgccatcgccgctatagcgttaaagacttgtatgatcgtttggctgcttcaaacatccgtaaaaagaaacattatctttattcaagcatagttgaggctcaatatcatggacatagctttttattaaagctcgtctttgtctccaaccgtggaaacaagaacaagtatttggttttagctactactcagacaaagcttagccctgaagaaatcatccaactttatggtcgtagatggcaaattgaaacatattttaagacgtctaagcaatatcttgctttagataaatctcaagttcaaagctatgatggccaatgtggctatatcgcagttacagcaataacttatgatctattgacctggcaggaaagacaaaatacagatgataagacaatcggagatttattctatctaatgaacgaatccttacctgatattagattcgtagatgcattggtctacttaatttcagaattaaaagagcttaaacagaatagttttgaaaagatagatgaagtaatcaatgactttattaaccaactgccacgattcatacaaattgcactgaaacagatcatataaaaactaattacgtctaagaaagctcaatagtgacaggacttgagcttgattttggtgctttcaattttcagatacttaattacttgtttttgaatgtaaacatcataaactaaattcttttgccgcctcttctttagatagtggcccatttgctttagcatcttctgcaaaataaatatatcattttggaacaagtatctaagggtaaagttggtactatgatgggtgtcgggagtatgatcactggaattgcactagcacttgggtcgacctttggccgaatcgtccgtcctacaggcactaagtcggctgatttaaccagaatcgggacacaacatgcatatattttcctcttatgtttggttattttgatcatggctttatttatcaaatatgttggcagaagaactataactaaataacagaaaaatacctatactacatgtaaatattcatgtagtataggtattttatttactgtcttttttagctaataatttggctgtttgatgaccaattccagatgatgcccctgtaagtaatataacctttttcattatttttcctcatttccatagttgatagttatattatattttgcaaaaagcgacattaatatgacatcctgcgtcaattaaatagcaattgacgacagttgttgcatttcgaaaaatcgtatgctagtatttgcttacaaaaagtaagtaaataatttaggagttgataaaaatgaatattgaattaggtatctcatcatttggtgaaactacaccattagaaacaacaggaaaagcaattagtcatgatcaaagaatcagagacttattagaagaaatcattcttgcagacaaattgaatattgatgcatttgcaatcggtgaacagcatcgcaaagattttgctgtctcagcaccggaaatcattttagcagctgctgcttcgaaaactaagcaaatccatctttcaagtgctactacaaatctaccaacaattaatccaattagagtttatgaacaatatgcaacaatggatgcaatcgcaccaggaagagttgaaatcatggcaggacgtggatcatttactgaggcatttgatctattcggttatgatttagaaaattacgatgaactttttattgaaaaactagaaatgctactcaaaatgaacaaagaagaaattctcgattggccaaaaggaaagtttacacctagagttgatcataaaggaatttatccgcgcactaaaaagccaatccctatttctgtagctacaggcggaagcatagaatcgactatccgaactgcagagttaggtttgccaatcgtttatgcgataattggcggtgatcctttgcactttaaaccactaattaagttgtacagaagagttgcagaaaaagttggcaatgatttaacgaagatgccaattgctgcacactcttggggctggttaaatcatgataaagacaaagcaattaaggattacttctatcctaccaaattgttagttgatcaaattagtacggaaagaccgcaatggacagggatgacatatgaacaatatcttgaatcggtcggagaaaatggtgcaatttttgttggtgatagcgagactgttgctaataaaatcattaaagttatagaagaacttgggtttacacgtttctacctccacttgccaattgcctcaatgccgcatgaagatgtcatggatgcaattagaatttatggagaagaagtagtgccgaaggtgaagacgtattttcaaaaaaagactgagcaagatcgtcttaaattaaagtggaagaattaaatagagagtaataatatagggttcaagagtctagatgacttttgaaccctttttcacttttagagataaacctaaggaggatgcttattatgattattcgcaccgtaacaatggatgatttaaatgaagtagtagaactggaatctgacgcatttaagatgactaaaaagcaaactgaacaagatatgattggtagaattgagaattatcctgatacttttttagttgcacaagaagatggaaaagtgattggtcatatttttggtcctgcttttaataaacgctatattgaagatgaattatattttgaaaatcatcctaatcaaaaagatgatcgctatcaaatggtcttgagtttagcggtcttgcctgaataccgcaaacaaggcgtagcgacaaaattaattgaagcaatagcgcaagagggcagaaagcaaaatcgtcaagctatatctttaacttgtttaccgaaattgattaaattttatgaaaaacgtggtttttataatgaaggcgagaccaatgatgatattccagatccaactggtgttactagcgtaaatatggtaagggctttgtaaaatgacgcaattaactgaagaaatgtatgcaatttttgatcgggatgaattttcttttaaaaaattgaaatcgcaatattctgaagatgaattagcgcaaataaaaacagattttaaagaaatttggcagacctggaaagaaataaacttcctgaattgtcaaattaagtgcaacagttaggctatgaggaaatatattgcttgaagagttcttctgctgtgtgatattgaaggattcgacgatgtttgcggttaatggcatcagttgcctgttgaacataagcagctgacttatctttcatgcttttgcctttagggaagaattgacgcagaagtccattgcagttctcattggtgcctctttcccatggagaatatgggtgggcgaagtagatctggcagcctttgatctcggtcatatccgcaaactcagagccattgtcaaacgtgatcgatttaaaccaggcaggatgtctgtcaatctcattttgaagcagcctttggcatgtgcttgcccgatagtcaggaatcttgataactacttcaaagcgtgtggttctttcggtcaaagtcattaaagcaggctgattcttgcgtctgacgcctttaaccagatctccttcccagtgcagcggcgtttttctgtcttcaatctctttaggacgctgttcaatggaattgccaagatgcttcttgtgcaaagcatgaccgctatggccgtgatgacgcttgttcctgcgtcttttgagcttcataggcagatcaatattgcttatgtccagcaagccctgatcaatatagcgatagacagttggagggtagcctggcatagtccttttgaattcaccaacgaattcatcgatgctggtggcatcaaatttagctttaaagcgtctggagagcattctcaaaaagacagcataatgcttcaatggattgcgctgatagcagtttttgcgacgcttctcataataaatctgtgcagtatcagcgtaatagtgctcatacaataaatagctgctgtctctttgcaggacacttccgcgtttgatttcgcgactgattgtcgacttatggcagccgacttcttgagcgataacagtacgggaagttatgccggaatccagcattgcttgaatttgtccacgttgtacgctggttaattgatgatagtgcttagaaatgctagaatttgaattggtcataaagatcttcctttcttgatttttcgtcacttcaagtttaggtcttcatggcctttttgtttaacacttagtgttgcacttcaattttaaatccgggaaagaaataaacttaaatgtttatcaaaaattaccacaagataaatttgctaaagttcatgttgaaagttggaccaatggttggaacttccgcgatcattactgggcagcttatcgtttgaatgctttagccgataaaagtccatgcatcggcgtgatgctggataataagcagctgcaggtttatcttatgtttcagcattataagagtgaaaagcgcggcgataatcctgaacaatacaataaattattaactgatcttcctgattgggcaaaagggcggacaactaataattggtacttatgggataaaaacgaaatggagtttgctgatcatttatccttaaatgagtatttaacagatgctgaaaaacagacttcatttaataaggaagcaactcaatccagtttcctattaggaaaatttgcttttagaaagcaagatcaagttgcagatatggaaaacttcatcttagatggtattgggcagctattgtcgttatatcgaaagttagcaaattaaaatacgttaaaattgtattttaaagtgttcatgctacataataaaagtaaatactgctgttattgtttaattaaagggataacaaatgaatatttattcaattattggcatgatcattttaggtttagttaccggcacagtaactagtatgattgttgccttaatttttgtcttcttaggaattgccatgcttgttgtgcatttaattaagtgaaatctatacgtaaaagtaataaggcaaaataacaaattgatattttgggaataagtattgctgtgctatattgaaggtgttactgctccatcattggtgcaattgatcataatccttctgcaggtacagttctccttgataaaaaataaaactaaattcatcaacgttatctaataatgatataatgtctgtgttggattttttagaaaagagataaaaacaaaaatgaatacaatcgcatttaaccaacaattatcagataagttgaacgaagaacttaatccagaattgttctctaccccaggtaagggtgagattacagttgttgctaatgaaaagaaagacttacgtgagtaccgtattattactaaggataataaagtagtcgatgtagtcgatgcatatgatgcagatcatgatgcagcttatcaaaagatgatggatttcttgaagaattaccgttaataattgaattaaactaatgggctagaagcttgataatgagtttctagtctatttttttgccaatttttcttaaaggattagctagatgtagtaataattttgccgttcaagttatttttttaaccacttagtaaaaagtaattgaatattaaaaaaatagcagtaatattaaacataaataagatatttttaatattttaatttgcttggagatgagacaaatgagtattacagagatttttaaggtcaataaagctaaattcattttaatttttctaatggttatcattggtacaaccgttgatgctgcttcgcaatatttgatgaccccggcctttaaccagctaaagaaaatgaatttatttggctttattatttttatttgtttggctattggctgtgatctagttagattagccttgattactagttcagattatttatacggaaagcaatcacaatcttatttgcatcaaattcgtgtaaaaattagtcgctacttttttaaaaatgaaattgcccaaactgctaaagtgcaaaatgaattggttgccaatcttgatcagctaacacagaattatttaaaaccaatcaaaaacggttttatgtacttgttgtctgtgcttttctcaattggaattttgttttcatttaactggcttttagtagtaatgacggtgattttaactgcaatttcattatttttgcctaaaacttttgaaaaaatgacttcatcggccacaataaaggttactaagaaaaatgaaaagttcttaaacactttagccaagtggatgagtggtctggatgaattacgaagatatgccagttttaatatatttagtgaatcagttaaccaaagcgcagacgaatataaaaaagcagctattcatcaaggagcaactattgctattgcagatatgatcacctttgtagttaatattgtgggacaaatgctcttgatggttttatgtgcttacttatatttgcaaggacaaattgtttttggtgcggtaattactactattcaatttagttcaactgtaatgaatggtgtttcagcatttgtaacggaatggaatttaattaaatctaccaaggatttgaataaggaaattactaatcttcaagctccagtaaaaatagctccagatcagcatcaagttaagaagattaacaggctagaagtaaaagatctggccttacaattcaaaaatggtgagtatttatcttacccagattttacagttaagcaaggtgaaaaaatcttgcttactggtgatagtggaactggcaagtcaactttatttaaattaactgaaaattgaaagcaccaaaatcaagctcaagtcctgtcactattgagctttcttagacgtaattagtttttatatgatctgtttcagtgcaatttgtatgaatcgtggcagttggttaataaagtcattgattacttcatctatcttttcaaaactattctgtttaagctcttttaattctgaaattaagtagaccaatgcatctacgaatctaatatcaggtaaggattcgttcattagatagaataaatctccgattgtcttatcatctgtattttgtctttcctgccaggtcaatagatcataagttattgctgtaactgcgatatagccacattggccatcatagctttgaacttgagatttatctaaagcaagatattgcttagacgtcttaaaatatgtttcaatttgccatctacgaccataaagttggatgatttcttcagggctaagctttgtctgagtagtagctaaaaccaaatacttgttcttgtttccacggttggagacaaagacgagctttaataaaaagctatgtccatgatattgagcatcaactatgcttgaataaagataatgtttctttttacggatgtttgaagcagccaaacgatcatacaagtctttaacgctatagcggcgatggcgataaatgtaataaatctttgaactcttcttgatcatgccaagtccatctaaaccgatcttctttaaaatccaaaacattcttggagaagaaaaccaagaatcgaataagacgtatttagcttctactcctaatcgtaaggcttgtctaatcaactctacagttacatcattcatctttctctgagcttgatttctccttttaccagaaattgaacgttcatcagcagtaatgggagcagctccaatcatatttttcttggttttggttgacatcaaggcaaagttaaccggcaagaaggtattgccatcgctccagcctaaagttaaaccacgatatccgttcaaatactcatgcttgtcatggtcatagactttagctagcaattcggtctttttagaaaaagaccgagccatcagcgtatcgtcaacgataaaagcaagtcggcgtcttttatcgataaatggttttaagcagccaatgagccgggctgcaatcaagcataatagtttttgccagttgattcttccatcgttaagtacattgcgagcagttctaacggaaaaacgtttgtcatccttagctctgaataaagaaagccgagcaaaatgtactgacatcagccaagagataatcatggttaatgaaacggtggatttacgcttaaaattgacttgtttagttaacttagctagaccaattagattaataaatgaagaaattaaggatttagtatcattttctgtgtcgatttgttctatactgttcattgcgcaggatctcctttactttttaggtcgacacttaaagtataacgcagagagagcctgcgtttttatttttgataagaaaaagccaagaggcgcggggaaggagcgttaatcttagctttcaagtttcagtaaattaattttaggtaaattaacgcccagccaaggtgagatcattttttttgatcataatggtcaaaaattaaattttgatcttgatgaattaggctatattgctcaagataataccttgtttcctgacacaattgccaataatatcacgatgtttaatagtgctttaaataatcaaatttcaggtgtattagatcaagtaggttttaccaaggatttggataagatgtctgctggacttaatagtcaaattgatttggataaaggaaatttatctggaggacaaaggcagaagcttgtgttagccagagctttgattcatcaatcaccttggctattgattgatgaagggactagtgcaattgacagtgctgggacgaagcaagtattacaaaatttattgaatactccaagtactgtaattatgattgcgcacaattattctacagaattagtttcaatgtttgatcggcaaattaaattgactaatcgaggtgacgccgaatgagtttcaaaggctttattaaaactaattatttaagatttatttacattaatattttatcagttatttcaggtgtcgctgctattggtgcaggctacattcaaatgtactggctgacttatatcaaagatcgtgcttgggtgaagattttacttgcgacggctttaatggggattttatatttagctgctcaagggatgatctattatatccaatttgtaattcgagtgcaggaagaagaatataataaaaaggtgcgcgctcgtttggctacacattactttagagatggtcaaaatcatcaagtaccggccgtgcaaaatcggatgactaatgatttagaaatgattagaaaaaattattttgattggtatccaattgtgccgttctatggctcaatgtttgttgcggcattggtggctctacttacaattaattggtcaatctttttgactagtgtagtgattgatattgtttcttactttgtacctaaattagtacaaaagaaaatggaacaagcaactaataatgtttctgagcaaaataagcattatctagatgttttagctaaatggttctctggcttagaagaattaagaagatattttgctggtgctaagttatttcaggtaggtgaaaaaacttcaagtaaagtagaacaggctcatgttaaacaaacggctgctcaacagcaattaattattttgaatgggatctgtaacatggtaggacaaataatcctgttgtctttgacggcttttttgatcactaagaatttagtgatttttggtgcaattatgtctgtccaaaactttgcagctaatatttcgatcggcttacaacaaacaattcaggcattaagttttatgaaatcgtcacaggatttaatgaaacaagttgatggtgatgctactgtgattgaaaaagttaaagctggccaagaagagacaccagtagcattttcaacaaaagatttggctttgcagtatcctaatggtgaaaagcttacttttcctgatattgcagttaaacctggtgaaaagatcttattaaccggagattcaggtgcaggtaagtctactttatttaaattgattttaggtgaacttaagcctagtgcaggtaaagttgaatttcaaaatagtcaaggtttgacaattaagcctaatatgtcaagaataggctatattccacaagagccgaacctatttccgggtacaattaaagaaaacattacaatgttcaacaagcaacttaataatcaagtagctcaagtgcttgatgaagttaattttgcggccgatattaaaaagtttaaagcaggtgtcgatgaaaaaattgacttggataatttgaatatttccggaggtcaacgacaaaagatcgtattggcaagatcgaagatccatggtagtgacattattttgattgatgaaggaactagtgcaattgatcagacagcgactatggatattttacaaaaattattaaaaagcaagaccacaattgtctttattgctcacaattttaataaacagatgcaggaaatgtttgatcgcgaaattcatttaataaaagaataaaaaatcaattagagaaaaaactcccaaatattaatatttttaatttgaaccttgacaaaatggtgatttaaccagtaaattaattgcggattattaattaggatagattaattattggagttgtgaaaattgaataaaaaatctaaagctcctcaactcaaacgaacaatgacagcaggtcaaatggaaatgatctctcttggcggtgctatcggtgttggtttgtttatggggtcaacctcgactattaaatggaccggtccgtcagtattattagcctacatgtttgtggggttgattttatatattgtaatgcgggcattaggtgagatgctttatatcaatccagggacaggttcatttgctgattatgcaacagaatatgtgcatcccttagcaggctatttagcgatgtgggccaatgtctttgaatatattgtagtaggaatgtccgaagtagtcgcggcaactgaatatctgaagtattggtggccgaatatttcggcgctgtggtcggggatcatcattattgcctttttactactagccaatttagctagtgctaaggcttatgcatcactagaattttggtttgccatgatcaaagtaataacgattattttaatgattattttaggctttatcgttattttctttggtgtaggtaatggcggccacccaactggctttagcaatttatggtctcacggtggtttctttacagggggagtaaaaggctttttcttctcaatgtcaattattgttggttcatatgaaggcattgaattattaggtatctctgctggtgaagtagctaacccacaaaaagcaattatcaaaagtgtcaagtccgttttgcttagaatcctgattttctatgtaggagcaatttttgtaattgttacgatttatccatggaataaattaaatagcctgggttcaccatttgtaaccacttttgctaaagtaggaattactgcagctgcttcaattattaacttcgttgttttaacggctgctctttctggtgctaactcagggatttattcttccagcagaatgttgtttaagctgtctcatgaccacgaagcaccgggaatttttaagcatatttctaagcgaattgtacctgatcgtgcaattatggggatttctgctggtatttttattggttttgtcttgaacgtaattgcttcacaatttaatcattcagctagtgatttatttgtaattgtcttcagttcatctgttttaccaggaatgattccttggtttgtgattttattagctgaattaagatttagacggcataacaaagaagcgatgcaagatcatccatttaaattgccgttatatccattttcaaattactttgcctttgcaatgttgataatgattgtaattttcatgtttatcaatcctgatacgagaatttcagttatcgcaggggcattagtcctgattgtggcaacaatcgtctacttagttagacacaaaaatgaatttaagaaaagtaattaaggtgattattcacctttttatttttatctaaaaacactaaatctatggtttttcattatctaacatgcaagatctatggtatgttagaagaaatgttttttgaaaggtgaagataatggcaattcttgaacaaccatatttggatttgttagaaaaaattatgactgaaggacatgacaaggatgatcgaactggtactggaactagatcatattttggtgcccaaatgcgttttgatttgacacagggctttccacttttaacgactaagaaagtgccgtttggtttaattaaaagtgaattattgtggttcttacggggcgatactaatattcgctttttgttagagcataacaattatatttgggatgaatgggcctttaaaaattggattgaaagtgctgaatatcagggggctgatatgacagattttggcttgcgtagtcaaagtgatccagaatttaatcaagtttatcaagcagaaatgaagaaatttgatcagcgcattcttgatgatcctgcttttgcccagaaatatggcaacttaggtgatgtctatggggcacaatggcgtcattggaaaaagcggacaggcggttttatcgatcaaattgctgacgtgattaagcaaattaaggaaacgccagattctcgtagaatgattgtcacggcctggaatccggaagatgtgccaactagtgctttgccaccatgccatgtcatgttccaattttatgtagtcgatggcaaaattagcgtgcagctttatcaaagaagtggtgatatgtttttaggcgtgccatttaatattgcttcatattcgctgctcttgaacatgattgcgcgtgaaaccggcttaaaagtgggtgaatttgtacatactttaggggatgcacatatttatcgcaaccactttagccaagtaaaggaattgctgagtcggacgccatatgattcacctgaattgtggcttaatcctgaaaaaaagcacattgaagactttgaaatgaaagatatcaaagtgctgaattatcagcaccatggcacgatcaaggcaccggttgcagtttaggaggtctcaatgttaagttttgtttgggctgaagatcagcagcatggtattggcatcgatggccatttgccttggaatctgccggctgacttgaagcattttaaggaaaagaccataggtcatccgatcatcatggggcgaaaaacctttgcgagtttgcctcacttgttaccagagagaaaacatattgttttaactcatcgtcaagaattaaagcaaaaatatgcgggtaatgagcaagtgaagattgtgtccacattagctgaattaaatgaatatcttcgtcaacatcagactgaagaaatctgtgcaattggtggagtttcaatctttagggcgttacttgatcaagttgatcttttagaaaaaacagagatcaaagctaattttaaaactgatacagtgatgccagcgattaactatgatgattttgaattagttagtcgcgaagagcatcatcatgatgaaaagaacaagtatgactatacttttttaagttatcatagaaaaaataaataattgttaaaaagtctcgcagagttgcgtggcttttttatttttcgctataatggatgaaagtattttcagtataggacagaaaattatgacagataaacaaataacgggattaactcaagctgaagttgatcaaagaattcaaaatggacaggttaatcaagccattgatgaccagtccaaaacagctactcaaataattcgagaaaatgtctttacttattttaacttgatttttgctattttggctgtgctattggtgtttgttggtgcctggaacgatctgacttttttaccagtgattgttttaaacacgattatcggtattgtgcaggagcttcgtgctaaaaaagttttaagcaagttaaacgtgatgaatgcgacggaaattatcgcggtgcgtgatgggcaagaagaaaaaattcccatcgaaaaattggttcaagatgatgtcattcttttacaaactggtgaccagattccagctgatgcgcgggtaatctcaggtgagctgcgggttaatgaagccttgttgacaggtgaatctgatgaaatcactaagactaaagacgcagaattaatgtcaggttcttttgtagtttccggtaaggcttatgccgtcttagaaaaagtgggtaaagactcatatatttctaaattaacgatcaaagcaaaggcaatgggcagtgttgaacaatctgaaatggtgcgttcaatcaatcgtctggttaaatgggtcggcatcatcattattccggtgggaattgccctatttagtcagagtttctttttgaataatattggactcaagcgtagtatcacttccatggaagctgctttaattgggatgattccagaagggctatatttattgactacgattgccttagctctagctgctatgcgattagtgcgacaagaagtaatgctgcacgatatgaagagtgttgaaactttagcccgagtaaatgtcctttgtgtagataaaacgggaacaattaccgaaccgaagatggccgtagaaaaagctgttagtagcaagaattttactggtgatttaagtagcatcattgcggattttgctaaaaacatgccagctgataacgcgacgatgaaggcgattcaagcctattttaaagatggaaccaaaacggcggatagcgttttgccttttacctcagtcaataaatattctggtgtaatttttggcaatcagacaactttaattggtgcgcctgaaatggttttgcgtgatcaatttgcgcaatatcaaactgaatttgaaaaatatgcggcagaaggctaccgggtgttgattgcggctaattatcctggcgtattaactgaagataattccgccttaaaggaaaatgtacaagttctcggttatattttattgtcgaatccaattcgtaaagaagccaagtcaacttttcaatattttaaccagcaaggtgttgatatcaaggttatttctggggataatccggtaaccgttgctcgagtagctaagcaagctggaattaatggggcagataagtatatcgatgcgcaaaccattaaagatggtgaatatgagcaggccgtgcaaaactataatgtctttggccgggttaagcctgatcaaaagcgaaagtttgtcgttgctttgcaaaatcaaggtaataccgtagccatgactggtgacggagttaacgatattttagcgatgaaaaaggcggattgctcaatcgctatggcttctggtaatagtgctgcagtgcaagcttcacaagtggttttgctcgattctaattttgctaaaatgccgttagtggtgaaccaaggcaggcaagtagttaataacattcaacgttcagccagcttgttcttggtgaaaaacattttttcattcttgatggccatcttctctttgattatgacaatcaattatccgctgcagccagcccagatcacattgatctctgcatttacaattggcttgccgtcgtttttattggccttagaaagcaatcacaagcgaattcgtggaaagtttatgccaaatgttttagctcgggcaattccagggggcttaacagattggctggcagttgcaattttagtcattgcaggggcctctatctcacttgatcatggtcaggtaggcacgacagcgactatgttgctagtcttagttggttttatggtgatgtatcatatttcggcaccaataaacaaatttagacttgctgttatgggcttatcagttatctgtattattggctcaactatctttttccaaagattgttctcattgacaatgcttaataacaaatcattatttattttggcggtcttattctgtgcggcagtgactatctttagatggttatctaaaattttggatggaatcgccgaagtgttggttgtctttgatcaaaaaggaaagaacatgacttttgtggaattcaaggaagcatatgatcgtggcaaaaataatgtgaaataagaagataatgaaaaagccagagttttgctctgacttttttactaccttaatgattttcgatatccagcagcttgtgcggcagcttcactgttgaagtaaactgcattagctgatgacatatgataattttgcccattcattacatggtagatcttactgcgacgattgccaacgactcggtgttctgcagtggatacagtacctttgatatggtgaatggttcgtttcttggttactcgagaagtggatcgttttctagattttacatgttcagcaatagtactagacctatgtttaaccttagaagtaccggtcttgtaattaagcaacataccaggttgctcattaaaaatgtagacattaaagcgaggcccgtttttgctagttgcttcggcttccatttcaacgccgttagctaataggtcattccctttaaatattggagtaacccgatagcggacatagtttttgctcgaactacgtaaatattcagcaacctcattttcatatttaagcatatctggatcatttaattcacgcgtaccggtaatcaaattgcgtggattgttgttttgaccagtcaactgatagccgattagatggcaccgattatacaaccaaccactagcgattcgtttattatgccagccggtcggattccaagttaaagccgcacgctgactatgtggcattaatcttttatttagtaaagcattagcagcatgagctcggttcaaataatctaattggccatatttttgccatggaccttttttcttgctcagtgtactcttagaaaactgcggctgatcatgatcaacggtcacaatttctttgttgtggtatttcaaattgactaatgctttatctgaaacagcatagacggtttgattgttgcatgggacattagtattagcaaaagaaatgaatccaattgctgcagctaatgagagagcaaaacttcgaaagcgatttttcttcattttttctccttagcaaaaataaattatttaactatatcctaattatacaatgaaatcgcttttatctaataaaaattaaaaaagatgttgactagattaaaagaagatgataacttatttataacaaatcaagaaaacaacatcttgaaggactgagtaactagaacttctattgataaagagagccagcgtggtggtgaaagttggcaaataggagctagtgaatatgggtttggaacgatgaccggtggtgatatttagctatcggcggggctgcatccgttaacagtgcaggctattttttgatagccagtgaggttgattacgtaagtgatcagcgaattaaaggtggtaacgcgagcactcgtcctttggggatgggtgcttttttatttttatcaaagtaggagtgtattttatgagaaaacggagaagaagaaataccattatttggacgatcattgggatactgatcgtgattgcaggttggtttagttttggtccaggaattcccagtcaaaatcaggcaaaaactgttacagtcggaatcgttggggaaagtaaagccgaagccgcaatttggaagtcaattgctaaaacggctaaggaaaaatatggtattaccttaaaaactaagaactttacggattacaaccaacctaacaaggccttgaagtcgggcgatattgacatgaatgcttttcaacactatgccttcttaaaggattggaataaggcaaatcacggtggcgttgtcgccattggtagaacctacatcgcaccgatcagactttattcacgcaagtatcataaattgagtgacttacctgatggtgccacgattgcagtgcctaacgatgctactaacgaatcaagagcactgtttgttttgaaaaatgccggcttaattaagttgaagaagggtaagaccttagttactgtagctgatatcaccagcaatccaaataactacaagattaaggaaatcggtgctgaacaaactggtcgagtattgaattcagttgacgcttctgtagtaaataatgattatgctggtcctgctggcttgactgataagcaaacgatttacattgaaccaattaacaaagattcaaaacaatggattaacattctttgtgtcaaacaaggcaaacaaaaggacaagctttaccaagatgtcgtcaaggcttaccaaactgcagaaactaagaagctaactaaggaatactatggcaatacgcaaattgcagcctgggacgttaagttgaagtaaggaggatcaaaaatgagtattgttgaattgaaaaatgtagaagtggccttccctcagaagaagggcgaaccagttaaagcagtgaataatgtttctctttccattgaaaaaggcgacatttatggaattgtaggcttctctggtgccggcaagtcaactttagttagaacggtcaatcttttacaaaaaccaactgccggtagtattaccgttgatggcactgaatttgttaaagatggcaagcaggtgatttctaataaagaattgcaattaaagcgcagaaacatcggaatgatcttccagggttttaacctattaaatgaaacgactgtattagaaaatgtagcctttgccttaaaacatgaaaagttgagtgatgaggaattagaaaaacggtcattggaactgcttgatctggttgacttaaaagataaggctgacttttatccagctgaattatctggtgggcaacaacaaagagtagcgattgctagagctttggctaataatccagatattttgatctctgatgaagcaaccagtgccttggacccacaaaatacgcaacaaatcttggacctgcttaagcgtttgaacaaaaagttccacttaacggtcatcttaatcacgcacgaaatggatgctgttaagaagattgccactaaggtcgccgtcatggaacacggcaatgtgattgaagacggcagtttgcgagatgtcttcttacatcctaagcaggatttaaccaagaagtttgttggtggatcacttgaagcgatttctactttgaattcattggcgcttgataagcttggcaaaaatgaagcaatttatcaattagtttacagcgtagctaatgtgactaaatcaatcattattgaattgtataagcaaattggcgtagaagtttcaatgctttatgggaatgttgaacttttgaatgaagagccaattggtactttggtggtattggtgaaaggcgatccagctaagcaaaagcaaacacaagaatttttggctaagcaaaatgtgacatttacacgtttagatgaaaaggggaatgtatatcatgattagtttcttaagtaaatatttacccaatgttgttcaacttggctggggcggagacgctggctggggcactagtatttttcagaccttatttatgactttttggtcagctatctttggtggcattcttggtattatctttggcgtgattttagttttaactaaggatggcgggattcggcccaataaattctggtacaatttctcagataagctagtttcaatcttcagagcgattccgttcattatcctgcttgcctttgttgcaccagttactcaaaaaattgtaggtacacagatcggaatgaaggcagccttagtaccattaactttaggcgtatttccattttatgctcgtcaggtgcaagttgctttagaaagtgttgacccaggtaaggttgaagccgcagaaagtttgggctcaactgcgcgtgatattatctttgatgtttatttaagagaatctcgctcagaactgattcgtgtttcgacggtgacgattatttctttgattggtttgactgcaatggctggtgctgtaggtgccggtggtttaggtaataccgctatttcatacggttataaccgattcaataatgatgttactttagtagctactgtattagtaattattttgatttttatcgttcaaatcattggtgacttctttgctaaaagaatgaatcaccagtctagataaaactatgatccaggaaaaatcctgggtctttttttggaatgaaattgaaaaagaaagcctttacaggtattataaatggtgattgataattaacgcaaaccttatagagcttaataaggaggaatataatatgagcgaagaagaataccgtgttgaaagtgacactattggtccagttaagatccctaaaaatgctttatggggccctcaaactgaaagaagccgcaataacttcccaagtggtgaattgatgccattgcaaattattcgagcatttttacacttaaagaaggcagctgcagaaagtaacgttgaagttggcgatgaaccaaaagaaaaaggcgaagcaattgaagatgcaattgatcatttgctagctttaagcgatactgacttgcgtaaggacttcccacttcatgttttgcaaaccggttcaggtactcaaagcaacatgaacgttaacgaagttgtagctaacttggctaataaattgcacccaggtttagatattttgcctaatgatgatgttaaccgtggtcaatcatctaatgatacttatccaactgcaatgaatattgttgccgttgaagcattggacaagttggaaccagcaattcaacacttaattgatgaattagttgttaaagaaaagaaatattggaagactgttaaagttggtcgaacccacttacaagacgcaacgcctttgacttttggtcaagaattatctggctatatttctgctcttaaacatgacttatcatatattcgtgaattgaagccaactctctacgaattagctattggtgggactgctgtagggactggcttgaatgcagcaccgggaatgaccgaaaaaattgctggtaaattatcagaagtctatggtcataaatttgaagttaaaactaataaattctggggcttagctcaccattcaggtcttgatgtagttcatggtgcccttaaaacattggctgctgatatgtttaagattgcgcaagatattcgtttacttgcttcaggtccgagagcgggctaccatgaattaaatattccagcaaatgagccaggttcaagtattatgccaggtaaagttaacccaactcaggcagaggctgtgacaatggctgctgctaaagtatttggtaatgacaccaccattacctttgcttctagtcaaggtaattttgaaatgaacgtcttcaagacagtcatcattgcatcattcttagatagttgtgatattttaactggtacaattactggttttgctgataaaatgattcatggcttaacggttaatgaagaaagaatggatgaattacttgagaattcattaatgaccgttactgccttgtcgccacatattggctatcatgctgctgctaagattgcgcaaactgctgataaagaaggcactactttaagagaagctgctttgaagagtggtaaagttactgaagaacaatatgatgaatggatggactatatgcaaatgactaatgttgataagtctactccagaagaatagggaaagtaagaaatgccaaatacaaaagaattaaagaataaatatgatgctatcgttgttggctcaggcggagcaggtctgactgctgcacttcaagctcatgaactaggtctaaatgttgttgtgcttgaaaaaaatgagaaaactggtggtaacactagtcgtgcttcaagtggaatgaacgcttctgaatctttggttcagcttgacgaagggatcattgataataaccgtgacttctatgaagaaactttaaaaggtggaggtttattaaatgaccgtgccatgttgaagtactttgttaaccactctgctttagctatttcatggttgatgaaatatggtattcgtttaactgatttgaccattacaggagggatgagtaagaaacgtgctcaccgtcctgcttcaatggaaccagttggattttatctaacttcacgaatgacaacacaggtgaaaaaagcgggtattgacatctttactggtgctaaagttaccaagttgttgcaagatgctaagaagcgcgttaatggtgttgaagttgagacaccagatggcattaaaacagttaaagctaaggtggttcttttagctactggtggctttggtgcttccaaggatatcattaagaagtatcgtccagacttagttgactataagactactaatcagccaggggctacaggcgatggactgaagcttgctgaagcacttgatgctcaactaatgcaaatgaacttcattcaggttcacccaactgcagatactgataatccgcatgtttatttaattggtgaaggtctgcgcggtgaaggtgctatcttagttaacaagaatggtcaacgttttgttaatgaattaagtacacgaaagattgtttctagtgcaattactaatttgcatgaagatggggcatacttgatttttgactcaggtgtacgggctcattttgctgcagttgagttttatgaccagattggtttagtagaacatggtactgatttggctgatttagctaaaaaaattggcgtaaatggtgccaacttagaaaagaccattgccgcttggaataagtccgttgcaactggtaaggataaagaatttggcagaacgactgggatggatcgtgaactggatcgtggtccatactttgcaattcatgttcatccagcaattcactatactatgggtggtattcatattaatactgaaactcaagtacttgatactaatggtaatgtaattgatggattatttgcagctggtgaagtatctggcggacttcatggaaataatcgaattggtggtaactcaattgccgaaacagttatttttggtcgtcaagcaggtattcagatggctaaatatgttcgtgaaagtaaataatataagaaagattatgtaaagagagcggttggttaactgctctttttcgatagaaataataacactggcgagattttgatgggatattataatttataattatggaataaatcgtgtctaatgaaagcgcttagtgtataattaatcatgtagataaaaaacagtttataaacatttgaaaggactaatttaacttatgagtagaaaagtatttcttgttggtgatggtgctgttggttcaacttttgcaaatgacttattgcaaaatacaattgttgatgaattagcaatttttgatgtagctaaggatcgtcctgttggtgattcaatggaccttgaagatattacgccatttatgggtcaaaccaatattcatcctgcagccgattatagtgatgctaaagatgctgacgtttgtgtgatcactgctggtgttcctcgtaagccaggtgaaactagacttgacttggttaacaagaacgttaagattttggaaagtattgttaagccagtagttgaatcaggatttaatggtgtctttgttgtttccgcaaacccagttgacattttgacgactttgacccaaaagttgtctggtttccctaagaaccgtgtaattggtactggtacttcacttgattcaatgcgtcttcgtgttgaactttcaaagcgtttgaatgtcccagttgctaaggttaactcaatggttcttggtgaacacggtgatactagttttgaaaactttgatgaatcaacagttgctggtaaggcactccgtgattactcagaaatcaacgatgatgttctagcagaaattgagaccgatgtgcgtaagaaaggtggcaagatcattgccaacaaaggtgctacattctacggtgttgcaatgatgcttactcaaattgtctcagctattttggacaatcgtgcaatttgtttgccactttcagctccgattaatggtgaatacggtattaagcatgatctttacttaggtaccccaaccgttattaacggtgaagggatcgaaaaggtaattgaaactaagctttccgatactgagcatgctaagatgattaactcagcagacaagatgcaagaagttttgtcaggtataaacctttaattgatcattaattttattaaaagccctagttgtcaaaaactaggactttttcttaatgacaaaaaagctagaaaatagtattatataagaaaagattaataaaaaattaaaagataagaattaacgaggtatatcatgacagttatttcacaacaagaaattgaaggcttttctgaaagctttaattctaatcctgagaataaagtagcttctcgtgctgctcgtcgtagtggtttgcttgaagcttcatttaatgaccgcgtatcagaacgacttaaccatgtcttttcaactgaacttgatattggcggtgtaactgatcagaagcattctggtcgttgctgggaattcactactttgaatgttttgcgccactactttggcaaggaaaacaaggtcaaggattttacgttctcacaagcttataatttcttctgggacaagattgaacgtgctaacgctttttacaatgcaattattcgtttggcagataaacctttaactgatcgtcatgttcaagcatggcttgagtttgccggtgaagatggtggcctttggaccatggccattaatttagttaaaaagtatggcgtggtaccttcatatgcaatgccagaaagctttaatactaataacactactgctttagccgaaaacttagctcgtaaggagagaaaagacgctcttgttttgcgtaaattagttaatgaaggcaagagggatgaagcagaaaagaccaagaaggaattcttgaacgaaatttatcgcatggtatcagttgccttgggtgaaccaccaaagaaatttgatttggaataccgtgatgatgataagaagtaccatttggagcgtgatttgactccacaagcatttgttcaaaaatactttaaggacttcaacttcgatgattatgttgctttgtccaacattcctaaccatgaatataacaaggtttaccacttgccactttatgacaatgtggctggcggcgatcaagtcaaatacttgaatgtgccaattgaatacttagctcaagctgcagtagctcaacttaagtcaggtgaagcagttagctttggtaacgatgtcttgaagcaaatggaaagaaaaactggctttttggatactgaattgtacaagactgaccaattatttgacgttgatacgcaaatgagcaaggctgatcgtttgaatactggtgagggctttgctactcacgatatgactttagtcggtgttgatgaagacaacggtcatatccgtaagtggaaggttgaaaactcatggggcgacaagtttggtcacaagggcttctacgaaatgagtcaagcttggtttgaacaatatgtttacgatgtgattgtgaagaaggaatttttgccaaaggaattgcaagagttagttgatcaaccggctgttgacgtaatgccttgggaaaactttggtgaataagatcaaaataacaaagatcaagtaaagagaactggtttaattagccagttctctttttttgcataattatttgagtttaaataattcaaaaaataagtaaaaaatcaaaataatttaaaatttgtaaccgcttaatctattgataagtgtataatactaattgtgagttgtgatgagttttagtttttataaaaaggcttgtttaacaataacaagatagattagggagcataaagaggggagagctactctatgcctgtaggaaaaagaatttatttaaagaggcaaatgcctgatccaaaagttgtagctggttttaaaaagatcccagcttctaataccgcggattgcatggaacgaaattgtgctatgaatcctagaattaagttaatgtcgaatcctgatgaggaaatggttggtccagcatttacggttcacaccagggcgggtgacaacttagcaatttatgcggctttaaagtattgccagccaggcgatgtgattgtcatcgacgacgagggtgataacactagatctttgattggtgaggtaatgatgtcttacttacgcgatcaaaagaaaattgcaggtattgtaattggtggcccaattcgtgatattgataatttaagaaattggaaactgccgatttatgcaaccagtactaccccaggtggaccatataaagaaggacctggtgaaataaatgtacctgttgcttgtgggaatgttagtgttaacccaggtgatgtgattttaggggatgctgatggagtaatttgtattccacgtaaagatgctcctgagattttgcctaaggcacaagcttttcatgagcaggatgaggctaaagcaattgcctttagcaaaggagaagttgatttaagttgggtagataaaagcttagcagataaaggctttgacatcattgatgatgtgtatcgtccatagagaataggggattcttatgaaaactttagaaaaagtgaattataaaggctttatttggcctttgatcgttggaattgtattgtggtgtattactccatggcgtccaagtggcctttcggttcaggcatggcaaatgtttgccgttttcgttgccacaattgtagggtgtattacaaaacctttgccaattggtggtacaaccttagctggcttggtagtaactgttttagttggcttagcaccaatgaaggacgttacaaatgcaaaaggtatggtagttaatcaaggcgtgcttagttcatttggtaactctgctgcatggttaatcgctatggccttcattatggctcatggtattagtaaaacaggtctaggtaaccgtattgcctatattatgattcaaaaatttggtaagaagtcgttgggtattggttatgcgattactggattggaattaattctcggtgccttaattccatcgaactcagctcgtacgggtggggtcgtttggccagttgttgaatctgtttcaaaagaaggctacgattctaagccagatgatgcttctcgtaaaaagattggtgcctacattgactttactgcctttcatgccaatattttatcaacggctttgtttattaccggtgctgctcctaacatggtggctcaacaattagccgcacaaaagggctatcaaatgtcttgggcaggttggtttttcactgcaatcgtacctgttgctgtattggcagtaatcattccatttgttatttacaagatgtacccacctgagattaaagaaactccagatgctaagaaatgggctgatgaaaaattagcaaaaatgggaccaatgtcaactccagaaaaaattatgatgtcagtcttcattctttcaattgttttatgggttttgtctggtttctttaagatcccacaattagatgcgacttttgttgccttcctggctgtaactattttgatgattaccggtgtgttaacaatgcaggatgctctgaaagaaactggtgcttggaatatcttgatttggctttctatcctgatgttcatggctggtaagctgatttcatacggatttattgattggttctccaaattagttcaaaatagtcttcatggtgttagctggggctttgtattggcaattctagttttgcttttgttctacacccactacttctttgcaagtggaactgcacatatgactgctctttatttgccattcttgtctgttgcggttgcaactggtgctcctttaggcctttccgcaatgcttttagcctttactggtgcaatcaacgcatcaaccactcactatgctaatggtcctgcctcaattttggctactactggctatgttaaacaaggtgaatggtggaagatgaattttgtccttggattaatctatatgattatttttggaactgtcggagttctttggatgaagattattggtttatggtaaaaaataagcaatctggaatcaccaggttgctttttttgcgtcataatagaattgagtaatcaaaatgaaagaagattaaagatgaaatttaaaactaatgacgatgtaattttgcattataccgatacgggggatgaagataagcctgctttgattgggatcccaggtatagggggatcttgtcaaatgtggcaagatttaattgccttatttaaaaatgattatcgttttattatgcttgatccacgcaatcaaggacagtccgaacgaacctatcgtggacagcggattagtcgtcatgcagttgacttagaggagctattagttaagctcaatttgcatgatgtagtagctattggaaattccatgggggctgccaatatttgggcatatttgtcaatttatggcaaaggtagactaaaggcaatggttgatttagaccagtcaccaaagatgattgcggataagagctggaagtatggctttaaagacctaacttgggataattatcctgacatgcttaaatttgattttggcaaggcttgttaccatcacattgatgaaaaaatgtttttggctgctaaaaaagaatatcaagaattcccatatgatccagccgaaaactataactgtttagttgaacatgcggagcaagattggcgtgacatgattttggatacgccggttcccatgctggtaattgctggggaaaaatcgccattttttaatccagaatttacccaagcgataaaaatgctgaatcaagatgttcaaacggcgattgtaccggaatgtgggcatttgcctcaggctgagcaaccagaaaaaacgcatgagattattgctgaatttttgaaaaatttaaaaaattaatagataaattgaaataatcaaactaagagagtaaactatatttgtgaaaacgattaccgaaatagtaaggcggcatatttatggataaagtcgttgatttgtttttaaacgacgctacaactaggcaaaaatgggaaaacttgttggaatcattggggttaaatgattttagtgaacgcgaagttaacgtgattgatcatactattgggctagaagatgaggaaggcaatttagttggtactggtagtgtggctggtaatgtcttaaagtatatcggagtcaagaatgatgccgatacgcagggggctcgctttaataaagtggttacagccttaacgcaatatttgactaatgatggaattttccattcctttgtctttactaaagcaaagtatgcaactagctttgagcacttgcacttcaatttgttagccaagacggatcaggcagcctttttagaaaatggaacgcctgatgtgaaggaatttgtggctgaagtgcccgaaatagcagatcaagagcataagaaggtcgctgcaatagtcatgaatgcaaatccgtttaccttgggtcatcagcatttgattaagatggctagtgaagaaaacgatttggtttatgtctttgttgtggctaatgatgtttctttgtttagctttgatgagcgcttcaaattggtgcaagaaggtactaaggagtttagtaatgtgaaagtaatctctggcggagactacatggtttcaccagctacttttccagcatacttcttaaaatcacctgacgatttaattgctgtacaaacggtgatagacgcagctgtctttaagaatcaaattgcaccaggactgaacattacccgtcgttatattggtaaagaaccaatttcaagaacgactcacttttataatgttagcctagcgcatgagcttggtcctgagattgaagtaatcgtaattgatcgcttggaaaaagacggtcaaattgttactgccactaaagttagacagctgatcaaggatggcaatttaaaagagatcaataaattcgtgccggaaacgacttatgaatttattaagcaaaacatgcagaaattgcagtctaaaattgagaaaggaatgaatattgatggaaattaaaaccacagcagttgcgggaacacttgagagttcagatatccaaatcatgatttcaaagggttctaacggcattgagattgaccttgaatcagaagtaaaaaaggcctatggagatcagattgaaaaggtgattactgacaccttaaaagcttatggcttagaaaatgccaaggttaaagcaaccgataagggagcactggattgtgtaattaaggctcgtactttagcagctgcacaacgtgcaaccgaaacttcagacaagccagatttggaggtgctctaaatgccatacgttaagaatcgtttgcgtagaaccatgatgtttgtacctggtaataatccagctatgattaaggatgctggcatttatggtgcagattcgattatgcttgatttggaagactcagtttcattaacggaaaaagatgctgccagaatgttggtttatgaggcaattaagacagtcgatttcggtggcagtgaaattgtagttcgtgttaatggtcaagacacgccattttacgatgaagatgttaaggcaatggtaaaagccggcgttgacgttattcgcttgcctaaaactgaatcagctgcaatgattcaaaaattggtaaaggatatcgaacattgggaagatgaatttgacattgaaaatggttctattggcgtgatggctgccatcgaatcagccaagggtgtcttaaatgccccagaaattgcaaccgcaacgcctttaatgatgggcttggcggtatctggcgaagactatactgcagatatgcatactcatcgttatccagatggtcgcgaattggaatttgcgcgtaacatggttttacaagcagctcgggccgcagacgtatatgcctttgatacggtgttctcaaatatgaaggatactgaaggcttctatcgtgaaactaactatatccatgaactagggtatgatggcaagagtttggttaacccacgtcaaattcaaatggttaataaggtctttaatccaactaaagaagagattgagcaagctaagaatgttgaaaatgccattcgtgaagccaaagctaagggctcaggcgttatttcacttaatggtaagatgatcgataagccagttgtagaaaaggctaccagggttttggaaacagcgaaagcttctaacttgattgataaagaaggtaactacattggagaataaagtaaaacgcgaattaccagatgatttaatgaaaaaaatgaatttgaaaccatttgaaactactgaaattggtcatcctgaagttaagcgggttgctccaaaggtaagagttactactggacaaaataagattattgattcacttgatgaggtaatcaagaataacctgaaagatggtatgactatttcattccaccaccattttagaaatggggattatgtttttaacttggtaatggacaagattattagtatgggttaccaggatttaaccttggctccaagttcacttactggtgttatgaatgataaagttatcgaagcgattaaaaagggagtaatcactaatattacttcttcgggtatgcgcggttcactaggtgattttgtttcacatggcggcttgaagaatcctgtaattttccgctcacatggtaatcgtgctcgttcaattgaagaaggcgagattaaggttgatgttgccttcttgggtgtgccagtatctgatcccgcaggtaatgctaacggtcaagatggggatgctgtcttcggctcattgggctatgccctaatggatgctcgctatgctaataaggttgttttattaactgataatattgttgattatccaaatacgcctgcgtcaattcagcaagatcaagtggattatgtggttaaaattgataaagtcggagatccagacaagattggttctggtgccactcgctttaccaaggatcctaaggaactcaagattgctcaaatggttaaccaggtaatcattaactctccatattacaagcaagggtttagcttccaaactggttctggtggtgctgcattagctgtcaccaggtacttacgtcaaagtatgattgatgatggcattactgcatcatttgctttgggtggtattactaaacctaccactgacttacttgaagaaggtctagtcagaaaagttatggatgtgcaggactttgataagggtgctgcccaatcaatggctaacaataaaaatcaacaagaaattgatgcttcttggtatgctgatcctcataataagggtgcagtggttaacaacttggatgtttcaatcttgtcagctttacaaatcgatactgacttcaatgttaatgttatgactggctcagatggtgtcattcgtggagccgtcggtggtcaccaagattccgcagctggtgccaagatgacgattattacagctcctcttgttcggggacgtaatgcgactgttgttccaagagtagaaactattgttactccaggttcatcaattgatgttttagtaactgaaagaggaattgccattaatccagctcgccaggatttagtggatgcctttagtaaggtgccaggacttaagatcttggatattaatgaattgcaaaaaatggctgaaaaacaagttggtgtaccaaagccacttgaatatactgatcgtacggttgccttagttgagtatcgtgatggtactatcattgataccattaaggaagttagggattagttcaaaacgaaatgtatgaataagtaatcacaaaggtgtcacgaaagtggcatctttttgtttttattaaaatgttaagttgtatttttgcaagaaacgttttttaattatttgtgcaaatattttattttcaagcataaatatttgcaaattctaactacgatgcagtagtaaagtcacatcgcaatatcggtcaactaagaagaaccagtgtaggtgaaatatctgcactggttctttgcgtaaaaaaacacctcgttttaagaacgaggtgcgcgtatacatatatttttctgagtaattttattatgacacaaattagattgattttcacttatttagactcattattttgttttgatgaatatttttgttaaagtgaactaatgctaatgattttttgaggggagataaatatggaaagttggttatttctagcattggtgctagttgtagcgttattgggtaaaaacatgtcattaattattgcaacgggagtggtaatggtgtttaaattattaccgtttactagtaaatggctgcctactattcaagcaaaggggattaattggggcgtaactattatttcggttgcaattctagttcctattgcgacaggacagattggctttaaggatctgattaaaacttttaagtcgccagctggatggattgccattttagcgggaattgctgtagctatcttgtcacgttatggtgttgatcaattagcagcggtgccacaggtgacggttgcattagttttaggtactattattggagtagtggttttcaagggtgtagctgcaggtcctgtgattgctagtggaatgacatacttagtaattacgctgtttaacctacatttttgaggtataattatgaaaagtgaggcgatttaatgattattgtacatgaaaatacgcaagagcgattagatgactatcttgaacaccgtttgcataattatgaaataatcacgccgccgattcctaagaaacctgagattgtcactcaagatgatcataaacagaaaaatcgaaaaccaaaaagggaccattaggtccttttaattttggtctaaataaatggattataaaatctaccatgatcaagttgccagagaccaaccacaattaataccaaaatcacggctgcgatcattacaagataatcagcttttttaaatgattgggtgacataccaggtccgttttttctttgagccaaagcggcgtaattgcatggctgttgaaattgtatcgattcgatccaaactggagaagataagaggcatcacgatattcaatgtccccttaattcgtttgcctaaactagcctttttggatagttcattgccacgtgcttgttgggcagctgagatatcccaataagaattttggatatctgggatgtagcgtagagctagagaaacagcataggaaattttgtaactaatgccgattttatttaatgaagcagcaaattgactaggattagtagttaatagaaacagcaatacgattggaattgagcagacatattttaagaaaagattgaataagtagaatacctcttgcaatgttaatgtgaagtagccggcatggatcaagatgcttttagaatgataaatattttcaccatagcttggctgaaagatgaaaacaaaaatcagatttagcaacatgaaaactacaataaatttcacgataaaagaaatctgactccacttaatttttgcctctttaaacaagaaaattgataaaatacagatagcaattaagaatctggtatcataagttaccatacaagcaaccgagactaggagcataaaaactaacttagtggttgcgtttaattgataaataaaagaatcaccaggttgataacctaaaacttggctttcattatgcatgtttttcatctctttctgcatcaatataggcgcggacaaagctatctggattttctaattgatatttgatagcgagattatataaggaggttcgcttcaaagcagcctttttaattaaagctttttcagttaataacttgattggatctgtgtcagcaattagtgttccatcagcaaaagccagggatctgttagtgtattccatcagcaagtacatatcgtgagtgataatcataattgttttgccttgatcattaagctgttttaaaaagttcatgatctcagtataagtttgccaatcttgccctgcagttggttcatcaagaattaataactcaggattaagcactaaaattgcagcaattgtgactcgctttttctgaccgaaggataaagcagagattggccagttgcggtacggataaagaccacaaactttcaaagtatcatagaccttagtgcgaatagtctgctcatcataaccacgtagacgcaagcctagagctacttcgtcaaaaatcattttttgtgaaatcatctggttaggatcttgcatgacataaccaatcttatcggaacgctctttgattgaaaactgcttaaggttatcaccatcaaataaaataagtccctcattgtcgataaagccacaaataattcgacaaagggtggtttttcccgcaccattttgaccaactattgaaacaaaatcgccttgattgattgtcgctgtaacgtcatgtaaaggatgaatctgcaatttgctataacggtggccgacgcccttgagttctaatagaggatgagtctcttctttttcaccacttagggtaatgttgttttgccattcttgcaactgcttagcaatttcaggatcttggggcaaagcagcgactgaagttaggtcgggaatatgcgtaaggtcgacgttagctttttttaaggcatttaaataaagaggactacgaacaccaacgtcttctaaacaattctcatgtaatagatcatttggcttcttatcagctataatttcaccatcattaattaggataatgcgatctataggctgactcaaaacttcttctagacggtgttcaataatgattactgtcgcatttaattctttttgaatgcgatcaattaaagccatcgttttcattcctgaagctggggttaaattagcaagtggctcgtcaaaaagtaaaattggtgattcatcaaccatgacaccagctagagcaacaatttgtttttgaccaccagatagattttgtggcgcctgctttaataaatgctcaatccctaattcatcagcccagcgatgaacaacttgtttcatatgattttgtggttggcagtcgttttccaaagcaaaagcaatgtcttcaccaacagttaagccgataaattgactgtcagtatcttgtaggatagttgaggtggtgaaagaaagatcaaataggttagtgtctttaatattcttgccgttaatagtgcattcaccggtgatctcaccagtatctagattaggaattaggccgttaatacagcggccaatggtcgatttacctgaacctgatggtccagcaattaacaatttttcaccttgtttgatagttagattaatctgttttagtgttggctcggcctgactgtcatacttaaatgaaaaatctttgaattcaataattgttttaggcattgtttaatcctccttgcgcaagctgccttttttaatcttggttccagcataagctttaagtaggagcgtgccaatgaccataattgtaataccattagaaagcgtagccgaaattccttggacaaaaactttgttagcaggttcgctatagatgataatgtcaccgattggtgcaactacaatccaggcgagaatattggcaataatttgaatgatattaaaaaagattatttgtttaataccaaaaataccattttttaagtctaagcgtttggccgctaaaccgatgatccagcctaaaacagcagtagctaatacccagctccaccaagtctgcccgtacataatgaaatcggacaaagcatgtccaataaagccgacaataaaaccgaccttagcgccatagattgacgcaaaaagagccaaaaaaggaaagactaattcaatatttgtgttaggaataggcgtaggaatcgatgtgaaacgtgctaaaataacatagattgccgatccaattccgatcgctacaacatttttaactgataaacccttagtatgcatatttttctccaaaatttagtatatttacaaggtataattagtaagcggtaacagtcaagctgattgggagattcaatctatttaataaatttgtagaagaattactaagagggtatccttatattaaagaaaagaatttataaattagaggtaaaaaatgaagcaggatgaattaaagaaaattaaccatgaaataggttcgtatgttgctaaggtaaccaagacaatttgggttgacgataggacattgcagattgccacaatgatgattgattcttatggcgataccgtatatgtttgggttgaggaagccgatgatcattgccgcgttagtgatggcggacgaattctatttaagctagatcctaatgaagaagataaagagttatatgaaactgcggaagatattgcgctagggtcaggttatgaatttgatgaaaaacactgtgaaatttttgttgatgttgatcgcaagaatgtggctcaggcggcaatgaagctggcacaattacaagtagcaatttcatatttaggctaaaaaaagacatccctaagttttctttgattagggatgtcctttatttttaagtcatttcgaaaaactttagacatttgccatccttcctaggttcacatcttgtggctttttaccattgaggtcaaaatttgcaattgcttgtgctaaagccatcattgatacaacatctggaatacattcatcaattctaaactccataatgctcacctcccagtcattgtaaatccaactttagtaattgttaaccagtacataacaaattttagcatagaaaaagcagccaatttttggctgctttttctattttttattgctatgttgcataaagataaagaaggcagaaataatattaacaatcacagcaggtaaggctagagcagcggtaaagccatatagtgcattaccaattactcctaaaattggcccaattggtgagatattcatgttatgcgattgcactactgcaacggcattaaggatcacgccgaaccaggcaaataagtaaaatattaaagctattctagcagtgaagtcagctccaaggatggcaaaccaagagctaatgaataacacacaattgatcaggttcagtgcaccaatccataaatcatatttagattttttcattttttctcctcattataaatagtctatctctgtattactttagcgaattaatcgatattttgcaaaacgcgttgggcaattgcatcattagttactagatgagtaatgataccgctacgtaaggcgccaaggagtgcctcagatttaaagcgattgcggacgacacaaaaacgaattggcgttttcataatgtcattcatgctgataccacaaatgtgttgttcgaagtcagggaaaaattcacctttaatattatatggtcgtcccatgatcattccagctacatcgcagtcaggaatgtctttaaatagttcaggtccataattttctttcaaaaattgattagcttgaaatgattggaaagtactaagaccagtgaaaagcatgtctaagtgatgataacaattttcaattactttaaaataaggctcatgtttcaaggcaggcatgatctttggatttagtatataaagtggggttggcagacttagactatgggaatgcaatttttctgctgcatcttgggccaatggattcttcctgcggttagaattaattggttgaccaagtaattgaataaagtaaagttgctctaagtcctgctcaaaaaagtcgttgatcacgccatgcattgttgcaccccaactaataccagcgatttttgcttgctttagataggtttcaatttgtttagcagcgaagttaactacggcttcactattttcatcgcggttgccggtagtttcgacaataaaagcttcttttaatctgaatcttttctgaaattctctctctagtacctgattgcgtttgattccacgcgagattttaattttaacaattccacggttacgcgcgtcttctagtgctttagcgattaaatatcgcgataaatcatatttttgtgagatatcagcaatattaagctgactaaggtaaaagtcatgagcaatgttagcaagttgttcatcagttaattgagccactttaaatcatcctttatttcaaaataacttatatgtctattataaatttaaaataataaaaaggagcagcaaattttaaaatatcaaaaattatgatgaagttcctgtggtagaatataatggttataattatgcgaactatgtgagggaaagtaagaaactgtcaaatcttttgtgtaaatagatctttctcgtaaattgattttttaattatttatttaatcaaagtaggattctaaggtgtcctgaacctgaccaaagcctttatgaattcgattgaaataacggtcattgtagctcattgcctgaatgccaataaaagcatcaagcgactgttcagttggaaactctgccttaggcttagctttgcgcttgatcacattgttaaatgattcaatcatgttagtcgaataaattgaagctctgatctgcttgggatagttataaaagaccagcagatctggttctatgtctttcaagcttctgataacatggctgtaaaccttgccccatttggtatagaagtcatgcaggacagctgtggcttcttctttgtttgtctgttgatgcacctgtttgaattcgttcatgatcttttcacgatcgtcgacgcgtactttagcgcagatattgcgcatgacatgaaccaaacagcgttgaaaatgagctttaggataagtcctggccaaggctgttttcatgccaacaacaccatcagaaagaaaaagctcaacttgctttaagcctcgggatttcatgttttgaagcatatctgtccagacttcaatgttctcgctaggcgcaatgcagtagtcaatgacctccttgtgcccattaggcttgatgccaatggcaatatagactgcttcacgctcaaatgtttctcggcgcaaaggaaggtatgtcgcatccaaatagacgcagaaaaacttgtcgcttagcttgcgtttgtggtaagcctcaacctttggaatcatctgcttggaaatatttgatacctgagctggactgtaatggctgccatacatcttttcaattagatcggctatttccctggtggtcacgcccttggagtaaagcttgataatcatgctttccaagatatccgagtgctgcttgtagccaggcagcgtgtgctgatgaaattgaccgttgcgatcccggggcacttgcacttcaattgggccaaattgcgtatcaactttgcggaaataagcaccatttctagagttgccagtattccagccatttctggcatagggatcatagcccagaaaggcagtcaattcagcttctaacaagttattaacagcctgttgtagctctttgcgcaataaatcatttattttgtctggattgaatagagcttgagcaaaatctttggtaaaatcattcatgaaggagttcttctttctgtatgtgtttttttgttcaaaccaatcatacgagaaaggaactcctttttctaatgtttaaagaaataaatttaaggaatcattcatccttacacaaactattttacagtctcgaaagtaataatagcatgagtgaaattgatcgagaacatcatttatcagaaaaacatcatatgaagattctgtgggaggaatttttcaagagcgataataatacgatggcgcaggatgcaacattagttgaaaagacctcgattgtaggtcgagtaggtattatgcttttaagctgtggtacaggtgcttggcgagtacgtgattcaatggatacggttgccagaaccttgggcattacctgttcaacggatattggattagtgtcaattgaatatacctgttttgatgttgataatgaatcatattcccagactttatcgttaccagcaacaggtgtgaatatgactaagttgaatgaaatggaaaaattcgttcggcaatttgaaaagggacatggggaatggactatcggtcaaattcataaacgcttacgggagatttctcagcaaaagtcagcgtattctccgttaatttcgggacttagttcaggcttggcctgcggcggctttattttcttattaggcggcggtcttcctgaggtgatctgtgctttcttgggtgcagcttgcggtcaatatattagagcaattatgggtaagcacaggttaactttggtagccaagattgcggttgcggttgccatagcctgcagtgtttactttatgagttttcatgtaggagaaatattattccacattaatcatgatcatgcctatggctatattggtgccatgttgttcgtaattccgggttttccatttattacatctggattggacatgtctaagttagatatgcgctctgggcttgaacggctgacttatgcgattttaattatcgtaattgcaacgatggcaggctgggctgtagcaacaattttgcgtttgcatccaggatctatgcctaagttaaaaattgatccagggactttaacctgcttgcgattgctggctagcttttgtggggtgtttggtttttcaattatgtttaacagtcgaccacaaatggcagctacagccgcggtaatgggagcaatggcaaatacattacgtcttagcttggtcgattatgctcaggttgctccagctttggcagcatttattggtgctttaacagctggtctattagcaagtattgtaaggaaaaaagttggttttccaagaattgcaattactgttccatcaattgtaattatggtgcctggtctttacatgtatcgagctgtatttaactttggaatcacgaatattaatatcggagcttattggatcgtagaagcgttgatgattgtcgtggccttgctattaggtcttttagctgcacgtatcttaactgataagaagtggagacatgcagattaaataaattaaggtagaaaaaagagacggattttttgtctgtctcttttagtttgctattgttaattaatcatgctttctttttgtaatagtaaatcccagtagtcctagtgctgctaaagctagaccgattaagctcaggttagaattattttgactagtttgtggtaatttagaactaatattattgtaagacttaacgatattattagtagttctagtctttgttgttgaatttggaatattattaatggcagttccatggggtggaataattccatctttgtgttgcttctgtctttgcatatcagtgccataaggatgactgctagaattccaatttacttttttgtgaatctttgtctgtttgtattcattagacttaggtggttcagacttatttggctcagaaggctgcttcggttgttctggagtagtcggagtctcagattcaggtgtaggaataggagttggggttggttccggtttagaagcggagtaactatagggtacccaaatgctaatagttgctagattgccagttgttgttttttgaccattaactgtggtagaagcaattgaagctaaaaactccgaattaggtgcaattgcggaaatcccagtaattgaattgcttgtagcagtaagtttattctgtgaagaagcaatgtgaaccacgccatttttatctaaatgataatggccatcaattatgtctttaattgtagtattgttatacggaatagctgaaaatgcttgattgtttgatattcattgtgaccagtttgtttctgtgccttgcggatccttaactaaatcaacaaccctgcttctagagtaaataacttcttttactacatttggagtaggtgtttcatcatttttaggaacagccacatctggattatttataccggaaaagttttggctcttaagaccgtttacatagtagccttttacttcttccctaactgtagcagtttgcttttctatctgcgtttcatgaactaagtaaatgatgaagtgttgatctacattttcattattatcaaagttgccaaagccgatactgctgtccgtttttaatgtggcattggcgccagaaactttttcaattttatagtgcttatttttaaataaagctaatgcttcttctaacctgctaaattgaataggggtattagctgattggtcgtctttattttggtaatcagcactaagcccttgaccagcttcatcactagtcattgagagttgaaacccattatcgttaagtagtttattgattgcttgatcggttttatcagtgtcatcataaaatctgacatctgcatgttgagttatgtagtagggaatagttaattcatagtgagtaccgtctggagttgatgaagcaataatgaattggtgttgattattgagtctaattttatcaggagtaacaatattaactaagtctgctacatattttgcattagcgtttttattaggagaaactgtgacagtatatgcttgggctaaagcgttccaagttttgccattatcaatagaatattgagtccagctttggcccgaatcttcagatttaagtttgagcatgacttcatcagatgcaaatggagtgttagatttttgacttccgttagcgtagatatggttaattacgtagctaatagttttagtttgttcagtttcactgtcagaactacctttaatttggccgttccatgagaatgttttggtctctttaagcaatccttgaccagccattaaagaagctgattcatctttttttatttcggaagcgttgttacctttttcatctgtatgaaaagcggtaatttcgactgtttgttgttttgttttttcttggtttggtgaatctttagctgaactttgattattttggttacttggatcagcttgagttgactggatggtattatttgactgttcttgattagatttttgtgaatcttgttgagtttgttcttcattagtcgcagtattagtatccgcatgaacaagttgactattacttaagaaaaaagtagtgctaagtgcaactgcagctaaaccaacagacaactttctaaaaccaaatttttgttttccattaaattttgtattgaagctcaaatcatttttgtgtttaatttatctaaaccttcttttgggaacgtaaaagactgagtcttttacaatttattatcaatgtgttctttttacatttgacaacatattagattagcacaaataaataacattgctgatataaatttgacttttttataggcaaaaactttctttttagtataaatagtttagccttatatattaaatatttataatttgataataaataactattatatagaaaataaaaaatggcatgatatcaaaccacgtcattttaaatctgttattattttttcgctttatttacttggcaattgctaatgccgtaacaacaaaggcagcgatcatggtaactacaaagccaataattcctaacaatatattcatttttgtcatcttcttctatgtaattgttatattctgtatgcggtacatatatttactataacacaaaagaagaagaataacgcaataaattgtaagcgctttttattcttttagatcaataaaaggagcatggcagaatttggctaagtcttctgggttcaaaaagacactgcggccaacttcaccactagaaacaccaatttcaggatttccttgcatagagtcatccaaatagataggaaacttttccttaaaataaattccgataggagtattagcgccatgtacataaccagttgttttggctaatttctttaagggaagcatttcacattttttgttaccagaaactttagctaattttttcatgcttaaatgttcagtaactggtacgacaccaaccaatggaccagttttatttccttcgcagacgagagttttatagactaaacgctctttgtcttctaaaatagaagtgttcatttgtgcaactccgcctttatcttcggagacagcaaattgagcttgacgatacttgattttattttggtctaagattttttcgaccaatgttttttcgagtttgttctttttatttttcttctttgacatatttatcacctgttatcatgatagcattatgccaagaaaatcccaaaggagataatattaatgaaattactaattattaaaattgatactagtcatgaagttgaagacgctttgagcgtttttgctttagataatctgaatgcattgggtattgaatcaagaaagcgtagcgactttgagcaagcaggctggttgcatgattctactgtagttgaaatggatgacattaaagacttacctaaggatacatatttctatgcttattttgatgaagaagcagataaagacgcattagtaaaaaaattccaagataagttaaaggaattgaagagctatggcctagatgtaggggatgccaaaattacaacttcatacattaaggaccaagattggaacacggcatggcaaaagtattatcacgtgattgatttttcacgtcacttggcaattgtgcctgaatgggaagattacaaacccgcttttaaggaccagcaattaattaagcttgatccaggcttagcttttggtacaggaaatcacaaaactactcaattagcaatgatgggcctagagagagcaatggttaagccaatgaatgtagtggacgttggtacagggtccggtattttggcaattgctgcatcaaaattaggagcaactgacgttttagccacagatatttcagatgaatcaatgactgcagccaaacaaaatgcagccttaaacgatattaataatattcacactcaaaagactagtttgttagctgatgttaaaggcaagtttgacatcattgttgccaatattttggcagaaattttactagacttgattccacaaatggatagtcatttaaacgacgatggtcaagttatcttttctggaattgactacctgcaattgcctaagattgaaaaggctctagacgagaatggctttaaggtcgatttaaccatgcgtcaaggtcgctggattggactagcaattactagaaaagaaaaataaatatggtaaaatattatcaattaaattaaactttgatgagaggcacaatcttttaatgaaaaaactaggaaataaaatcgaagcaattccaattgtcaggaagttgaattctcatcgctggatgtcacttgtctggtggagtattttggtaatgattttgccgtatatctttagcatttgccgtgtgccggtagtgtggcgagaagcaattctgttttttattattaacagcatcattgcataccatctaggcaatttatttattaaacttaacctgtccaagtggtggattttcttgttacctgtgcttttctgcttagcaatgttgccacattttgctttgtataatttaatgtttggtttaatttacttaataattgaagcttttggcttaatgaataaaaatatttaccgctagaggggatgatcataatgtccaaatacattgaaatgacgcatgatcaggtaattgatacctgcaaaaagtatatgaatgatgaccaggtggcctttgttgaaaaagcatatgaatttgccaataaagctcatgctggacagaaacgggcgtctggacaaccttatattattcatccaacgcaagtggctggaactttagctacattaggcttagatcctgatacagttgcagcgggctttttgcacgatacagtggaagataccccagttacaaatgatgagctgaaggaaaaatttggtgaagatgtagcttttattgttgatggtgtaaccaagttaaacaaatatgagtacaagtctcatcaagaatttttagctgagaatcaccgtaaaatgttgattgccatggctcaagatctacgtgtaattatggtgaagttagccgaccgtttacacaatatgcatactctgcaacacttacgacctgataagcagcggcgtattgcttccgaaacaatggatatttatgcaccgctggctgatcgtctaggtattgggacaattaagtgggaactagaagatatgtctttccactacttaaatcccgaagcctattaccgcattgttaacttgatggatgtcaagcgaagccagcgtgaaaaatatattgccgatacaatcaagactttgaagaagactctaaatgaattaggcattaaatatgaaatttatggtcgtccgaagcatatttattcaatctataaaaagatggttaataagcataaagattttgatgagatttatgacttattggccgtacgtgtaattgttaaaaatgtgcgtgattgttatgctgttttgggtgctgttcatactgaatggaagccaatgccaggtcgttttaaggattacattgctatgccaaaggttaacggctatcaatcactccatacaaccattattgggcctggcggtcgtccactagaaattcagattagaactgaacaaatgcataaagtagctgaatatggtgtggctgcacactgggcttataagcgtggcaattttactggtgttgagcaaagtacctctggtgaaaagctggatatggtaagagaaatccttgaattaaaggatgaaactaaagatgccggtgaatttatgaagtctgttaaaagtgatattttttcagacagagtttatgtttttacgcctaaaggtgaagtatatgaactacctaaaggttcggttacgctagattttgcctatgcaattcacactcaagttggtagtcatgcagtaggtgccaaagttaataacaaattagttcctttggactataaattacgcaatggcgatgttattgaaattatgacacagactaatgcagcgccatcgcgtgactgggttgacatggtgaagacttcaagagcacgcaacaagattagacgctacttcagaagtcaggatagagaagatagcatccagcatggtgaacaattgattgctgatatgttgcgcgatgaggatctttcacccaaagaatttatggccagggatcgaattgaaaagctattagagcactttaattatcacactgcagatgaactatatgcggcagtaggctttggtgatctttctgctcaagcagtggttaatcgcttgacggttgatttgcgccgtgaggaagaaaatcaaaaacaaaaagagctggaagaaaagattttgaattctggacaacaagcagttcaagaagaacaacctaagaagaattcaaatactacaatgaaggttaagcataaaaatggcgtcatgatccaaggcgttagtgacttaatgcttcatttagctaagtgttgtaatccagttccaggtgacaagattattgggtatgtaactaaaggtcgcggtgtaactattcaccgaacagattgccgtaatatcaccaaagaagctgaagaacaaggtcgcttaattgatgttgaatgggaaaatgttgaggaaaatagtgttcaatcctttaatgcaaatattgaagtctttggttacaatcgttccaatctgcttagtgacgttattaataagttgaattcacttactaagaatattaataatatttctggtaaagtaaacgaagataatgttgcacatatgtatgtcacagttgctgtacggaatgcagatcaactagatgaaattttgagtaaattacgtgatattccagacgtatacgaaactaagaggtcagataattaatgcgagttgtaattcagagagtaaatcatgctcaagtagatattgacggtaaaactgtgggcaagattggtaaaggctttttattattagttggcatcaaaaatggtgatgaattgccagtaatcaaaaaagcagctgataaaatagctaaaatgcgtatttttgaagatgaggaggggaagactaacttgtctttaaaggatgttaacggagaaattttgtcggtatcacaatttacgttgatggcaaatactaaaaaaggcaaccgtcctagttttgttgatgcgatgcgtccaccaagatcgaaagaactttgggaagactttaatcaagaactagaaaatgacggtttccacgttgagactggtgagtttggggctgacatgcaagttagtttagaaaacgatggtccattcacgattgtgttagatctttagcgaaaaaatgagaccgcaaaggttgacaatgtcttgagaaaaatataagctaagtaagaattatcgatgacaaagaatgtagattagcaatgatctattcaaagagactgctcgttgtggtgagagagtagatagatcgcggtctgtgacacctttaacagataatggatcgtttggcgagcgttaatcgcagcaaccaaaaaggtggtaccgtgctaatctaagcgcccttgattaagttcaagggcgctttttatttttaatcaagttatcaaaatataaaaaggatgattaaatgagagttcaaaaacctaagggaacagttgatattttgcctgatcaatctggttcatggcaaaaagttgaagaaactgccagaaatttcttcaatcgcgcaaattatcgtgaaattcgcacaccaagttttgaaaattatgaaatctttgctcgttcaagtggcgatagttcagaaatcgttgaaaaacagatgtacgacttcgatgataagggtggtcgccatattgcccttcgcccagaaggaacagctagcgtagtgcgggcttatgtagaagacaagatgtatgcgccagaagttgttaagccatttaatgttttttatatggaatcaacttttagatatgaaagaccacaagccggtcgtcaacgtgaatttcaccaaattggggtagagagctttggctcaagcaacccattaagtgatgtacaaacaatcatgatgggacatgatttattgggtgagttaggcgttaagaattaccaacttcacattaacactttggggaatgagcaagtacgtcaagattatcatgatgctttggttaattatttcactcctttgaaagatgagttatcagaagactcacaaagaagattgcgtgataatccattgcgtattttagattctaaagatgaacgtgataagaagttcttgcctaaggcacctaagattcgtgaatttttggatgacgattcaaaagctaattttgaagcaatcttgaagatgctagatcaacttggtattgattatgtaattgatgatgatctagtacgtggacttgattactatactggaattatctttgaatttatggttgaagataagagcttatgggaaagtgcaactactattcttggtggtggtagatatgatcacttggtagaagaattcaatggacccgctactccagccgttggtttcgggattggcgaagaaagattgatgttggtgcttaaaaagcaaaatcctgcattattcgagaaacgcggtattgatttctttattactaatattggtgacggtactgcacaaaaggcaattgaaattgcacgtagccttcgtaatcaaggttttgaagctgactttgatgtcaatcagaagaagttaaagaaccaattcaagaaggcagatcgtgaaggtgctaagtatgttattactttaggtgaaaaggaactggctaacggcgttttgaatattaaacgtttagctgatggcaagacaatcgatttaagtcttgaagatctaaataacatgactaaaataatggatgaattgaaggactagtaacaatggaaaagatcgaaaaaagaacagattattgtggcaatattactgaaaaatacatcggtcaagatgtaaatctctatggttgggtacaacgtgtacgtaacttaggtaacttggttttcatcgatttgcgtgaccgtgaaggcttggttcagatcgttgttaacaaagattctggtaagaagttaatggatattgccgattcacttggtaatgaatatgttgttcaagttaaggggaaagttgttaagcgttcagaagttaaccctgacatgaagactggtcaagttgaagttgatgcaactgaaatcattattttaaacaaggctaagaaccctccatttgaaattaaagatggaattgaagtctcagaacaaactagattaaagtatcgctatcttgatcttcgccgtccagaagttcaacaagcaattattttacgttcaaagattttgcgtgctactcatgaattctttgatgaaaatggttttattgatattgaaactccaatcttaggtaagtcatcacctgaaggtgcacgtgactacttagtaccatcaagaatctatccaggtagtttctacgctttgccacaatcaccacaactgttcaagcagcttttaatgggtgcaggatttgacaagtattaccagttagctcgttgtttccgtgatgaagacctacgtggtgaccgccaaccagaatttactcaaattgatatggaaatgtcatttgctgatgaagaaactattcagagttatactgaaggtcttttgaagaaaattatgaaagatgtcaagggcattgatcttaaaactccaattaagcgaattacttggactgattcaatgaacaagtatggctgtgacaaaccagatactcgttacggtatgttgattcatgacttaagcccaattttcaaggatagtgactttaaggtcttctccggtgcaattgctgatggcggttttgttaagggaattgctgttaaaaatggtgcaaaagaatactcacgtaagaagattgacaagaaggctgactttattaaacgattccacgctaaaggtttggcttgggttaaatttgaagatggcgaattttcaggccctgttgctcgcttcttgactgatgagaacaaagaagctttgaagaaggaatttgatcttgaaggtggcgaattagtagtattcgtagctgataagtggaaggtatgttgtgattcacttgaccaccttcgtcgtgaatttgccaaagaaactggtattattcctaagggtgtttatgactttgtttgggttgttgattggccattatttgaatacgatgaaggacttggccgttgggtagcagctcaccacccattcactatgccagatgatgaaggggttaagttgctaactactgaacctcataaggctcacgcacgtagttatgatattgttatgaatggtgatgagatgggcggtggctcaatccgtatccacaagcgctcaattcaagaaaatatgtttaaggcacttggtttcactaagaaacgtgcatatgaacaatttggttacttgatggatgctttggacatgggcttcccacctcacgcaggtttagctatcggtcttgatcgatttgcaatgatgcttgctgataaggataatattcgtgacgtttcagcattccctaagaatgcttctgcttcagaaccaatgatgcatgctccagctccagtagctgatcaacaattagctgacttggggatcgaagttgaggaaaagtaccaagacagtgtaaaggcaactgaagagcgtcttgaaaagatggctgctgaagatgctgcagaaaattcaacttgggataagtaataaatcaatataataaaaaataagtgatctcgctttgattgagatcacttatttttttatctgaattataaattattaacgaaatcactaatccgagctaaactttcttttaattgctcagttgatgatgcataagaaagacggacataaccttcaccgcccttgccaaagtagcgaccaggagtgacaccgacttttgctttttgagccagctcaaaagcgaattgctcatcattggtgccatatttttcggggatcttagcaaaaatgtagaatgctccttgcggtgtggccatttcaaagcccaacttttctaagccagattgcataaagtttaaacgtgcttcgtagatttcgcgtgcttttttaggatcgttttgaccattgtttaaggcttcgacagcagctatttgaacgttatcagtaactgaagtaactaaaaatgaattaatcttgcggatgctcttcataatttgtttaggagcagcaatatagcctaaacgccagccagtcatagcataagccttggataaaccggaaatcaaaatatttctgtcagggatgtattcagaaagtgagtgatgtttggctttgccataaacaagttctgcataaatttcatcagttacagaaaagattttgtattccttaatgacatctgctaaggtttttagagctgtggcagaataaacgcggccagttggattagaaggatcagttaaaataattgcctttgcacctttaccgcgaccattgagaacatgacgtaaatgttcagctgttaagatgaagtcatcttttttagtatcgacttgaatagggattgctccagtcattttaattagctgaaagtataaagcccaaaccggagtaggaaccaaaattttgtcaccggggttaagcaaggtcataaagacatcatttaatgcacctgttgcaccgacagtgacacagatttcactttttggatcataatgtacaccaattgagcggtcaaggtaattgctaatagcttcaagtagttctggcttaccagcttgaggagcataatgggaatcattagcctgaatatcacgaattgcggcatctttaatatgatcaggtgttgctaaatcaggttcaccaatagttaacttaataatcccagaaatttcagagaccttttggtcaaatgctcgaattttagatgcggtcaagttgtttagtctctcattaatagttgaagttaaatcactggataaatttggcatatataaagttcctttctgtattatataaattttaaattactcattaatataaaacaactatttttaaagcaacttgtaaattgaacaaaaaataggaaactgtcaaatcttttgtgtaaatagttctttctcgcaaattgattttttaattatttattcaaaataagattctaaggtatcctgaacctgaccaaagcctttatgaattcggttgaaatagcggtcattgtagctcattgcctggatgccaataaatgcatcaagcgactgttcagttggaaattctgccttaggcttagctttacgcttgatgacgttgttaaaggattcaatcatattggttgaataaattgaagctctgatttgtttgggataattgtagaagaccagcagatcgggctcaatttccttcaaacctttgatgacattgctataagctttattccatctggcatagaatttgtgcaagacagctgcagcttcttttttgcttgtctgttgatgtatctgcttgaattcgttcatgatcttttcgcggtcatccacccggactttagcacagatattgcgcatgacatgaaccaagcagcgttgaaaatgagctttaggataagtcctggccaaggctgttttcatgccaacaacaccatcagaaagaaaaagctcaacttgctttaagcctcgggatttcatgttttgaagcatatctgtccagacttcaatgttctcgctaggtgcaatgcagtagtcaatgacctccttgtgcccattaggcttgatgccaatggcaatatagactgcttcacgctcaaacgtttctcggcgcaaaggaaggtatgtcgcatccaaatagacacagaaaaacttgtcgcttagcttgcgcttgtgataagcctcaaccttggggagcatctgcttggaaatatttgatacttgagctggactataatgactgccatacattttctcaatcaagtcagcgatttctctggtagttacgcctttggagtagagcttgataatcgtgctttccaaaacatcagagtgctgcttgtagtcaggcagcgtgtgctgatgaaactgaccgttgcggtctcgaggcacttgcacttcaattggtccaaactgggtatcaaccttgcggaaataagcaccatttctagaattgccagtattccagccatttctggcatagggatcatagcctagaaaggcagtcaactcagcttctagcaagttattaacagcctgttgtagctctttgcgcaataaatcatttattttgtctggattgaatagagcttgagcaaaatctttggtaaaatcattcatgaaggagttcttctttctgtatgtgtttttttgttcaaaccaatcatacgagaaaggaactcctttttctaatgtttaaagaaataaatttaaggaatcattcatccttacacaaactattttacagtctcaaaaatagggaagatgaaactaatcatttccctatttgtttttaagaacagtattcaaattagtataaattgctggcttaggcagagatttatctggcatttgcagccaatgaggcaaaattccatttaaaggttgaagtggccttttagtgggctgatgcaactcaagcttcctatcaacaatcttgattgtagtggcacttttatcacgtggtacagaggataattgtggtttagtgcaggccgataagctaagtaagaatatagttagtaaaagtagtttttgcatatttttcaatttttcctccaaatataactcccaacctaagtgtataattttttacggtaagttgaataaataattaaaaaagcccaagtcctttgaatttggacttgagctcaaacaaaaagaccagtagtctgatgttaagaacaaaaaacacattagaagctggtcttttatgaattcaattgtaactgaaatcgcaaatattataaagtctgaagataattatattaagcgtgaaagaaaaataatctgtttcttcttaaacctgattaaggaaatcatggccttggctttagctaaagttgatgatgaaatgattaccaaggttaaagcacagggctatcagattgataagaagaatgagcgctcaatcaatatggcttttggcgaagttaggtatgtcagaagaagatatgtctgcccaggcaaacaagcaaggtatcccttggatgaattaatgggctttgacaaatacaagcgctacagtattttagcagtcaaaaacatcttagaagtaagcagcgttgccacttatcgcaatactgctctagcagtcaattgcctgtctggctttaatattagccatatgcaggtgggcaatttggtaaaaatggccgggaaaaatattaaagcgggccaagaagcagattcaagatatgatgccgcaggcactaagaaaaaggtcccagttttgtatcttgaaggcgatggcgtggtgatcaaaggcactaaaagccggttggaatttcatcgctatcaggtctgtgaaggcattgtcaatataagcaagaaacgcagaaagcgaatcaatgccaaggaatttgtttctttaagccgacttgatgcgctgaacgaagccaaggagtacctggccaatacttatgatctttctgatactgtaattcttagcaacgccgatggcggtgctggatatgccaaaacagacttcgatgacattgtagggctatgcaagcgtcatgagcatttcttggatgtctttcacctaaataagaaaatcaaagaaaggctatattttgcgcctgacctgcaaggcaagctgatttctgctttggaatacaaatacagctatgacaaagttaaaactatcctaaccactgcagaaagccgactaattgatgaattgaataccgagctcaatcatgattatctggggcgcctaaggaattatattgatcgtcattgggacgatattaagccgtttaagaaacgaaaactgactgtgactaaagccattggctgctgcgagagcaaccaccgcaagtatacctaccgtgttaaggggcaaggcaagaaatggtcaaaatctggagcagaaggcatgcttaggatcttaagctgcatcaagaatcgagagctggaattttggcttagcagcgagtttgaagattcagaaataactgtattgactgaacaggaattaaaagcagcggcccgtgacagcttaaagaagcgtcatgaagttcatttaggcatccagcatggcgcattaaccgcacaggtagctggcaatagttatttaagcaagctaagcagaaatttaagtcatataaatatttaagaaattaaggttagactaatggtttaaaggctaccgcaaaaacattgacacttacactcccaacacaatattctactatttaagtggacaatgataaaataaaaataagtttagatgacgaggaatggtaaaatgagtcgaataacaatttatatgacaggtggaatcgctgattataaggcagttaacgttatccgcgatttagaaaaagcgggtcatcaagttcaaatagtaatgactaaaaatgcagagcattttgtaactactaatacactggctgctttaacaaagtatcctgttttggatgatttatggagcaaggaaaatcagtctagcataccacatgttcatctagcgcgttggacagagttagctctggttttaccagcgactgcaaattttattgctaaaatggcaacgggaattgctgacgatgcagctagcactacaattttagctacaagtgcacctaaattggttgtaccagccatgaatgaccaaatgtggaataatccagctacacagcgaaatatagcttttctgaaagaacatggtgtagaaataatggagcctgcagtagggatgctggcagaaggctatgctgctaaaggacgaatgccagagccaggagcaattgtggcgtggatcaaaaatttcactgaacaacagaacgttttgcaaggaaaaaatattgttattactgctggtggtactgaagaagcaatcgatcccgtccgctttattggtaaccgctctagtgggaaaatgggcatttccttagctacagaagcagcagcgatgggagcaaaagtaaagctaatatatggtaatgtaagtatgcctttgccacaaaatcctaggattacattaattcatgtttctagtagcgaagaaatgttagttgcagtcaaaaaagaatttaagcatagtaacgttttaattatggctgctgcagtagcggattggcgcatgaaacaagttgcagatcataaattaaaaaagcaagctgatcaacaaactttgactctaactttagttaaaacgacagatattttacgcgaagttgctagccacaagcagcgagggcagatagttgtcggctttgcggcagaaacgaataatttgctacaaaatgctgcaaaaaagctatcttcaaaaggtgcagatatgattgtagcaaatgacgtttctaaaaatgtttttggcaatgatgaagaccaggtaacgattttacaaaaaaataagtcaactaagaaatggcctaaaatgagtaagcgaaagattgctcaaaaattgttgcagcttattgctcaaaaaatatagtatttgcatatagctaatagtgaactatatgatctatatttctcttgtaatcattttgtaatatagcatctaagctttttaaacatgtgatgaaaactataatgtgaaaactaaaagtaagtaaaagatgttttttatccttgtttaaatgataaatgctggtattataggtgttgggaattaagagactgaagagaaagagttgataggacatcatcagccctttctttttttatacgaaaatactaattttgtatagaataataaaataaattatttgataatctttataaacccagcagcattgattgatgctactattttaattagaaaatataacagaatcacaaaaaataaaatgtatgtataggatttgcaacaattttgttgtactctattaacagatggctgaaaaaaacaattattgtttaataattgttattagctatacaaatacaggaattaagaaacagagacatattagtaaaatgtagaggtgtatatatgtactctgataaaactttaatgctcaataacggagtagaggttcctcgaattcaactaggaacttggctaattaataacgatgatgtacgaaaagtaattcgtcaagcgattaatgttggttaccgcgctttcgacactgctaaagactatggcaatgaaagtggtgtgggaaaaggtatttggaactctgatgttgagagtagtgatattttttaacaactaaattaccaacttcgattaaagactatgaaggtacaaaaaagcaattgatgacgctttagatcgatttagtttggaatatattgatatgttgttaattcattcaccacaaccttggattgaagtgaatagaattaatgatcgtcactttgaaggcaatctggaaaactggagagcaatggaagaagcacttaaagccggtaaagttagatcaattggtgtttcaaattttttacaagaagacgtagctaacattgttaataacagctcaattaagccagtagttaatcaaatcgaagttcatataggaaatgtgccaactgatttgatgaaataatgtaaaaatttaggaattcagattaaagcatattctccacttgcacatggtcgtttgttaaaggatccaagaatcaggacttacgctgaaaagtatcatgttagtccagctcaattaatgttagcatttgacttacagctaggttgtattgttttgccgaagagtgataatgttaaagaaatgcaggaaaacttgaacatcgattttgaaatcagtgctgatgatatggctgatttggtcaagttaaaagaaaatacgcagaccatggctgtttaataggagcatcgcataagcggtgctttctttgttgtaagggaaaaggtaatggaagaaattaagctaatcgcgatagatattgatggaaccttagttaattctaagaaggagattacaccagcagttaaaaaagcaattttgactgctcaaaaacaaggcaagcaaatcgtaatttgcacaggtcggcctttgtcaggtactcaacgttatttagatgaattagggcttaatggccaagaaaatcagtatgtagttagttttaatggtgcagttgtagaatcaaccgcggggcaggttattttcaaacaggggctaaaatatgaagattatgtagatttagagacaattgcgcgaaagctaaacttacattttcatagcgtatcgttagatcgaatttatacagctagccgtgatttgggacattatacaatttataattcacgggtcgtaaaattagaagtctcatatcgtacacaagaagaaatgaagcagataccaatcatcaaatgtatgtatgttgatgatccagactatttagatgataaaatagaatctcctttatttgaaatgatgaaagatcgagttgtattttcaaagactgagcctttttattatgaagcaaccgctgccggtgtcgataaggggactggcctgaaaagactatgtgactacttaaaaatagatcgaagtaatgtgatggccctaggcgatcaagcaaacgacatgccgatgttaacttatgctggattaggtatcgcaatgggaaatgctgttgaatatacaaagcaacatgctgacgaagttacggctgattgtgaccacgacggtgttgcagttgcaatcaataaaatattaaagtagatgttttctctttcaaatagtggtatttttactttaagatgaaaattgaatagaggtctaaaaataatgaataaagcaaaagttttagttttaggtggcttaagagatgaggccttaactgatttaaaaaatatttgtcaagttgatatcggtccagtaggacatcgaccagaagatgatcgtgagtgggtgcttgatcatattgcagaatatgatggtgtgatcgtagcaaagatggcttttgatcgagaaatgattgatgctgcgaaaaatttaaaaataatttcaacttatggcgttggctttgatcacgttgatgttgaatacgctaaagaaaaaggaatagttgtttcaaattgccctaagagtgtgttgcgtccaacggcggaacttgcctggacaatgattatggcatcagctcgtagattgcattattatgacgatgctttgcgtgaaggcgtctttttaaatgccgatgagtacgacaaccaagggtactccattgaaggaaagaccttaggaattgtaggtatgggtcgaattggtcaacaagttgctaggttcgctaaagcatttggtatgacaattatttatcataatcgtcatcaagtagatgatcaaattgcagcagaattagatgctaaatatgttgacttagatactttggcaaaagaagctgattttgtgagtttacatactcctgctacagctgaaacatatcatctggttaattcagactttttaaagaaaatgaaagacacagcgtttttaattaatgttgctcgtggatcgttgattgacggggatgcattaattgctgcgttaaagaatggttcaattgcaggcgccgccttagatgttttcgaaaacgaaccgcatccaagacctgaattggttgaaatggataatgtgatcatgacgcctcacgttggttcagctactcacattgctagatttaatttgtctaaagaagctgcgaataatgttttgtctttctttaaagatggtcaggcaattaatcaaattaactagttcaaacagagctaaaaaagacgattcatgcgaatcgtctttttctttacataatttttactgatgttaatcatgatcaagctgactatggtggtagccataaataaagtaaattacagcaccgatgattaaccaaatagctgccattaagtaaacttctgaacttaaatggcaaatcataaagatacaaattaaaccagaaatgattggcaaatatgggtatccgggaactttaaagccatcgttaacaatatctgttctttttcttaattttagaattccaaaggaaacaagagtaaaggcaaaaagtgtaccaaagttgaccaaattggctagttgatcaacggagaagaatgctgcacctgctgcaataataatagtgacagcgactaaggcattttgaggagagttatgttttttatctaatttactgaatgcactaggcaatagcccatcacgtgccatagcatagattaagcgagagcttgaatagatcattgtcagcatcatggtagccattcctagcatagcaccaaatgataataactctgctacccagttttgatgaacatattgcaatgcaaaagcaacgggattagatacgtttagcttggtataattaaccatacccgttaaaacgattgaaacgccaaaataaagtacagctgcaatagctaaagtgccaataattcctaggggcatatttttcttaggatttttaacctcggcggctgatgatgaaacaacatcaaagccaagaaaggcaaagaagactgtggttgctcctttgatgactcctgaaaaatgatatggcaagaacggatgatagttgttaggtttaatgaactgtaagcctacaaaaataaaaattaaaataatggcgattttaataaaaacagctacgacattaattttaattgagttcttcatccctcgtgacaacaggatactgataagtaaaatgattaaaacagaaaccaagtcaaaataaacgccattgttaagattcataggaccagaaatagcgtgtggaatttttagaccaaatggtgcaatgaaagaactgaagtatgatgaccaacctgctgccacagtggctacagatagcatgtattccaaaatcagtgcccaaccgataatccagcctgtaaattcgccataaacgatattcccatatgaataggcagaaccagctactgggatcgctgaagcaaattctgcataacacattccagctaaagcacaaacaattgctgcaacaacaaaggataaactaacgccaggtccagttaatgtggctgcaacagttccgggtaagatgaaaataccggtcccgatgacagctcctacgccaagagacattaaatcaacggcgttcattgttttggagaacttaatgtctttaccgagatagttctcaacattttgtttcctaaaaatattaaatttcattcgcaaacttcccttattatagattagattaattttacatgatatttttaatttttaaaagaagaaaacgctctatattttttatagagcgtttgaattaatcagctttaattttttgcttataccatttacaggaaaaatatattaaagcaattagaataagtcctccaataattaatgagtattcttcaaaaattaacacaatttgttcccaattttcacccatataggaaccaagaccaactagaatagcattccagagtaagctgcctaagctagtgtaaataaggaaattaggtaatttaactttggctattccagctggaattgaaattaagctacgaactacagggatgcagcgaccatagaagattgcaccggtaccgtatttatcaaaccatctgatagccttttgtacatcaccctttttaaagccaagtagtttgaataacttatgatcgaacaacttttctaatcgatctggattaagtaaagtgccaatccaatataaaactagtgcaccaactaccgcgccgattgttgaagcaataattacaccgaagacattcatttgagaatgatgggttgcaaagccagcgaacgatagaattacttcggatggaatagggggaaagatgttttcgattgcaattagcaaactgatggctaggtagccaaattggttaattaagtcaaaaactagattagtcatcaaaagttctcctcaaattttatttcttttaatatatcaacttttgtaccgaatagctatttctataagcaaagttaagatcttcttaaacagtctgtgttaaactattaaatgcaaattttttcagtgagatgagataatggcaacacaattaattgagaataaactaaaacttttaccagaaaaacccggctgttatttgatgaaagatattaacggtacggttatatatgttggtacgcgtggtgctagttaaatcgttctagacaataagccaaattataagctaaaattgcaatttccaaccggctttgaaagcctatcagactacgtgctcgattgttctcggcattgtaataggtcagaagcgaaaagtcgctttcaattgttctgcgaatagccatcaattgatgatcattgtgctttttagctcctgtcatatttttacgatatggtgtccaaagttcataacccatttgttttagctgttgatgcagttctttgcctaaatagccttcgtcgccaagaagatagtaattagatggatgggtattttccagcagttcaactgtctccctggcatcatgaactgatgcttttgttacgacataatcaagaatgtaaccgtcatcgctaacaatgacatgaactttgaaaccatagaagtaaattttcttggtggccttataaccaatgttggcataaccgcgaaaaattttagcacgatagttgcgaattggttggcaaacaggtaccggaaagctgtcaatgatcaagaaatgtccattcaggtcaacctttttattcatttcttgccgtatctgataaatcaattgcaatagctgacgtgaacgtcgattaaaacgtgagtgtgataaacaattgaaacattcacagaatcttctttgtgattcaattcctgtcttagcttgccagataagtaaagccaaaatcagactgtccgtagttttaatttgatcaatatttcgccgatgagtaaactcagccggtgcatacaaacgataccagtgccgacaaattatcactaaatctttaaaactaacttgtaaatggtggctaaaacgcttaagcttaaggcagttcaatcagatcaggctcttttctattattatacaagttgagtctaacaagattggacttttttattaactaaaacgatttaactagcaccacgcgtatgttggtaaatctaaaaatttaaaaaatcgggttcgctcatattttaagagtaaacaggttggacgtcgtgctgaattagttcgtgaaattcgagattatgacatcattactgtatcaactgataaggaagcttttttacttgaaattacattaataaaaaagtatcaaccttattataatgttcaattaaagcagggtacgggatatccttacatagaaatcacgcgtgaacatgatccgcaaactcggttaactagtatcgttcataaggatggtggctactattttggtccctatcctaatgtatatgctgcccaggccactttgaagtttattcaaaaagtttttccactaaggcgctgtcatggttatcaaggcagaccttgtctttactatcatatggggcagtgcttaggtgcatgctttaaaaaagtgccacaaaaagaatacgaagagcaaattaaaaagatcaagagctttttgaatggagatattgctagtgttaagcagagtttgaccgaaaaaatggctcaagcagctagcaatcttgaatttgaacgagcagccgaaattcgcgaccaattgaaatatattgaagaaacggttgaaaaacaaaaaattatttccaatgataatacgcagcgtgatatttttaattattacgttgacaagtcttggatttctgttcaaatcttctttttacggcaagcaaagttattgcgtagagaaaccagaatgtttcctttgacagatgccacagatccagaagatgctttcacttcctttattgtgcaattttatgggcaaagaaatagggttttgcccaaagaaattctgattcctgaaggatttgataatgctactttagctgaggttttgaaggtacctgttagaacaccgcaacgagggcagaaaaagtcattgctagacatggcgaaggataatgctaagttaaagctagatgataagtttagattattagaactaggtaatcgaaaaactaaaggcgctcaaaaagaaatttttgatgctttaggcttaccatatggacactttattgaaagttttgatcactcccatattcaaggtgctgacccagtctctgctttagtcgtttttaaagatggtgaacccgaaaaaacagcttatcgtaaatataagctaaaaggtgaggttgaacatcaaaatggtggcgacgaagtacgcaacacgagggaagttgtccgccgaagatatggtagactgttgcgcgagcataaaagaatgcctgatttgattttgatggatggtggtcaaattcaggtcgatgcttgtttagatgttttacgaaatgaattaaatttgaatatcccagttgcggggatggttaaagatgataagcacagaacaaaccatttattatttggcgatcccatcaacggtattcctttgaaactgattccccttaatcccaaatcagagggcttttatttaatgacgcgcgttcaagacgaagtgcaccgctttgcgattacttttcatagaagacgccatgctaaaaatgctttgtccagtcgtttagattcgattaagggaattggtcctaaaagtcgtaacaaattattgcgcgaatttggttcattgaagaaaattaaagaagcttcaattgatgacttgcgtagagcaggattaacgcttactcaagcacaaacggtaaaattaacattgtaatccgagaaaacgcgatatcatgcgtatttctgtggtatagtattaaaagctagattaagacggaaggaagagatatacatgcctacatttgttgatcaaactaaaatcgaagtacaagccggaaaaggcggcgatggcatggtggctttccgccatgaaaaatacgtccctaatggcggtccagccggtggtgatggtggccgtggcggcagtattatttttgttgctgacagcggcttaagaactttgatggattttcgctatcggcgtaagtttaaggcggatagtggtgaaaatggtcgtattaaatcacaatatggccgtgcagctaaggatctttatttaaaagttccagttggtactactgtatatgattatgacactaatgaattgattggtgatttaactgaaaagggccaagaactagtcgttgctaaaggtggtcgcggcggtcgcggtaatatccattttgcaactagtgttaatactgcaccagaaattgctgaaaatggtgaaccaggtgaagatcgcgttttgcgcttagaattaaaattattggctgatgtcggcttagttggttttccgtcagttggtaaatcaacactgttatcagtaacaactaaggccaagcccaaaattgctgcttatcaattcacgactttaactcctaatttgggaatggttatcttgccagatggtcgtgacttttcaatggcggatttgccaggattaattgaaggagctagtcaaggcgtaggcttgggaattcaatttttacgtcacgttgaaagaaccaaagtaattctacatctagtttcaatggatcctaataatggtcgtgaggcaattgatgattaccataccattaaaaaagaactcaaaaattacgaaacagatttatcaaagaagcgagaattgattgtagcttcacaaatggatattcctggtgctgaggaaaaactagctgagtttaaaaaagcattaaaagcagaaggaaataatgaacctatttatgagatctcaagtgtaactcataaaggcgtagataagttgatgtcagatactgccaacttagtaactgaagttgaacaagaacaggctgaagaacaacctaagctagcacaaaagattaaagaatataagtatcaggcaccacaaaagaatgaatttacagttgagcaagttggcgaacatgaatttatcgttaagggtgaacaattagaaagattagttcaaatgaccaacttggatcaccaagacggtattatgcgtttagcaagaaagcttaagcgtttaggtgttgatgacgcactacgtgaaaaaggagctgttaatggtgatgatgtggctattggcaagtttgtctttgaattcgtacaataagagtagagatagggtatgaaaaaaaataggtttattacggggtattctggccttagagccttagcagttatcggagtaattctttatcatttggatcctaattcctttatgggaggatatctgggagtgccgatttttttcgtgctctcaggatatttggtgacagatcatatgtttaattcatatgataaaacaggatcatataataatcgtcatttttatttgagtcgaataaaaaagttatatccacaattaattactgttttatggttaagtgcagcctatatctttatctttcaacgaaatttactggctaaattaaatcaggttgtacttgcaaatctattaaatgtatttaatttttggcaaattcataatggtcaaagctattttgagcgttttgcagctaatgaatcaccatttactaatttatggacgatgtcaattgaaggccaattttatattgtttggccaattgtcatttatttactagttaaattggttaaaaagaaaaaaaatattttctggattttagttggtctatcagctgtttctgcattagaaatggcaatcctatactttttaaaggctgatattaatcgaatttattatggaactgatactcgtttcttttctttaggattaggagcagcattagcagttgtttggccgatagagagtttaaatcagcaagttgaacgaaaagtaggctggatactggacttggtgggccttgcttcatttgctttaatgttagcaatgtttttctctaagtggatgaatccacaacaagcctttacttactctggcgggatgttgttatttactttagatgtatgtattttagtagcggtaattgctcatcctggtagtcattggaatcaaatcctaactaataggttatttgattggattggatcgcgaagttatggcatctatctgtatcaatttccagtaatgatcttttttgaagataaggtaaatattggtgataatccaatgctgtatcaccttattgaagtgattttaattttagtgattacagaaattacttatcgtttgattgaaagaccaatgggtaggattacctgggataaaacgaaccaatattttgctcgaatttttaattttgaaacaaaagattactttaagaaaggtcaagcagccttagcagctttgattttaatcttaggatcagcagctattgctatttcaccaggagtaaaagcagaagactttaataaaagccaattagcacagcgaattaatcagaattctaaaaaacaaaaaacggataatgctaaattaattgaaaagttaaaaaaagaaaaaaagaaaaaagaaaaaaaatctaaaattattcgtgaagctgagcttcaaactaaaaagcatcctattaacaaatcctttgttaaatatggtatttcccagttagatttgcaattggctcaacatgttcaagtaactgcgattggcgactcggtaatggccggttcgagcaacgatttaaaacgattaatgcctaaagcgttaattgatgctgctgtttcaagacaattgaatgttgcttttggcttattagatagttatcaaagtcaaggagttttagcagataatatcttaatagggttaggaactaatggacctttctcaatggaagatcttgatcgaataatgcatcaggctggacctaagagaaaagttttctggattaatgttcacgttccaactagagattggcaaaattcagtgaataatttgctaaatcaaggtgcaaaacggtatcataatcttataataattgattggtattcatactcgaagaatcatcctgactggttctacggtgatcatactcaccctaatttaaagggctcaaaatactatagtgcattagttaccaaaacaattgttaagcattcaaaattttagattagaataggattttcatggaattacaatttttaggtactggtgctgggcaaccttcaaagcaacgcaatgtttctagtgttgcacttaagttgctggatgaattgaatgaaatctggctttttgacgtaggtgaagcaactcagcatcaaattttaagaacaaatattaaattacgaaaagttaccaaaatttttatatcacataatcacggtgatcacatttttgggttaccagggttattgtcaactcgttcttttcaaggtgatgttggtcctattactatttatggtcccagtggtattgaagaatttgttagaacagctcttaaggtatctcggactaaaatttcatattctataaggtttgttgaattagctaaatcagggttaatctgtgaggataagggctttcgagtgtatacggagcaactagaccaccggatacctagttttggttttagagtagtggaggcttcacatccaggcgaattattaattgacaagttagcacagtataatgttcctaatgggccacttttggggaaattaaaaaatggcgaaaaagtaactttagctgatggtactgttttggatggtaaaaatttcttaggacctactaaaccgggaagaattgtgacggtcatctatgacacacgttccacgccaagtattgctcgtttggctaaagatgcagatgttttagtccatgaatcaacttttgcaggggatgaacaaaaattggcgcatgattattatcattctacttcggttgaagcagccaaaattgctcggaaagataatgttaaattattatgtctaaatcatatttctgctcgttatatgggtgctaaagggaaaaaactcgaaaaacaggctaaaaaagtattttctaatacagtattagttaatgattttgatcagattaatattccaatgaaaggctcagaaaaatgaaagactcattaagaaataaagttgttgtaattacaggtgcttcaagtgggattggacgttccattgcccttgaaagtgctggtcgtggtgctactgtaattttaattgctagaagaaaggaccaattagatgaaattgcagcagaagctaaagaactatccggtgctgaagcatatgtttttccaacagatatgggtaagccggaagaaattgaacaaacctttaatgcaattactaaacaagtaaaacacattgactttttagttaattgtgctggttttggtaaattcgaagaatttatggaccaaaaaatgcaagacgttaccaatatgttccaagttaatgttttaggtttgatgtactttactcgtttagtaggtagggtcatgatggaacaaaagactggtcaaattattaattttggctcaattgctggcaaggtaccaactaccaagtcagccgcttacagttcatctaaggctgccgtaattcaattttcaaatgtcttacggctagaattaaagccatttggtgtcaaggtaatgactgtaaacccaggaccagtttatactaatttccttaatgtagcagataagactggaaattatgtcaaaaatgttcaagaatttatgttggatccagatgatgttgcttggcaagtagttcacttctttggcagtgataaacgtgaattaaatttaccacttagtttagctgtagcggctaaattgtataatctatttccatcgattggtgataagatttccttaaagtttgcttctagaaagtaaaaaaagatggaaaaacaaagaaatttaattattggatcagttgtggctttaattgcagtaatttttgttgttttaaatacatcacctgtcgcaattaattttggcttttttaaggtgaggttaccactaattgttgtgttagtggtaatggtgattatcgggatgattattgcttggttctttggacgagatactaaggaaaaaacggatcacaaggtcactttcttcaataaaaaagagaagaaaatagaataaatcttgatttattagcaattgaatagtatgattgaactacgtgagtgattcggggttatatgaccctgaagcttaagactacaataaaggagatcaaattaaatggcagttcctgcaagacatacttctaaacaaaagaaacgttcacgtcgtggtcacattaagttgagtgttccagcaatgcactatgatgcaactactggtgaataccgcttaagccaccgtgtttcaccaaagggttattacaagggtcgtcaagttgtaaataacaacgacaacagcaataactagttaaaggacacctttgatatggtgtctttttttatgcctagaaaaaggaaaaagaaataatgaagttagtattgtttcactcaattaagcataaacactgatatatcaacacatagggtactaaaaaacaccttttggctaaaaaatggctaaaaaggtgctttttttattctaaatatttagttgtgaaatagagttaattgcgtcttctttattcttattgttaatatgagtgtaaatgtcaagggtcatttttatatttgcatgaccaagcaacatttgaactgttttaggtttaacattggtgttttcaattaagagagtggcaaaggtatgcctaaagccatgaatagatatgtgacgtaagtccttagctctaacataagaatcatctagcttatgttctttagcgtatttaacatttaatgcatgatctttagcatagacatctctaagccaatctcctggctgacttaatgaccaatagttgccgtttaacctatgaaatagcttgactgagacgattttctcactcttgcgataatctagcagtacttgctttaaattggctgagaggggaatagaacgctttgagttctttgtctttggagaagaaaggattaatttgtggtcaacacttgttaaagtcttgttaacagagattgtattgttgaccaagtcgatgtcattccaggtaagtgccaaagcttcaccttttctcatccctgtagaagctagtaatttaaagtatgtataaacacactgatttacttgtttagcaacatcaagaaatgtatcaagctcttctttagaataaacattatcgtccacattgcgacgcttgcgagtggttttctttggtgtaataattcgactaattgagttatctgatatgtagcctaaacgcataccatactcataaagtgatctcataattgatattacaggacgatagttaactaattcagttgctaatttatctgcccacttctgtagatccttcactaagatgctatccatgtaattattgccaaaatagggattaatatggtgcttgtaattaacaaatactctactagcactttgaggcttgacggtttctttgtaagttttaaaccatagttcaaacaattcattaactttaatttgtttttgtttaacaaaatcatctgccttgatctgagacattttgttatatgctgcttcagcttcagcataagatttaaaaccacgtcttctagtaataataggttttccattgctgttatatcctaaatagatctggaacataaaccgttttttaccagattttaatgcatactctttaattgaagtattttttctttttggcattttaatttttacctccattttgctaaaatagggtagacgaaaacgccgatgccagtcggcattcgtctacaaaatattttgtattttccggatacatttatgtctgcccgtttaccgtgccagcggtaagcgggtgtttttttaggattagtaatgttctacccagttcttaatattgtttctataactatttaattcatttcgcatagcgttatattcttgagaaccaacttgattttcaagtgaactattgaatctacgacgtgcattttctaaacgtctatcttgttcagctttagtcataaaccagccattgcctttgactacacaaatagatcctttgttgacttcaccagcgcctaagtgagtaataatccaagcattgttgtttgcttgagtagcagttacaactctgcctgaactaagattttgtttgtaaattctttttagtcgaggattgtattcaaacattttgactctcttagtaattacaacttcagttggttgagcaccaactaaagctttgtaaggaactttaaacttcttatgagtagctcttttcttagcacgcgcgtgctttcttgcaacttttgctgacttggtacgggatgcaaaaactgttgaggtaggagctgataaaactccacctagagttgcaccgactgctaataatgataaaatcttcttattcaaaattctatatcctccgaaaactattcaggtttaacgtcactgtggacgattaggtataatgtcaatgaggtgacaattatgaaaagtattatttatttcacaaaagaagacggtcagaataaattcttaagtacaatgcatatttctggtgaagatttacaatcaatagattatgtctcgccagaattaatgcatttttatactaaaagattgggtcacaagcctaccaatatctatatattcatcgacggtagtgaatttagacttttggaataaatttttgaatgtagctttccaagacattacttgcaatatttgaaagtagtgtaatagagataccctctaaatgggatgctacattttttgttgttttccaaattttaggatctcttatggtatctaaaaacttatggccattccatgtgattgaggtgacatcaaattcaatcaattgatattgagtaatgacgcaattatcatttaaataattcgtttcatctaacttcattaaactatatttaatagtttcagcatcgtatttatcaagtcggcttttggctggctttttttgatttaaaaaatcaggtaaatggagtgccatttctaattcttgttcttcctcaataaatagcatcacatctcttacacaatcatgatttaatctcataatcaaaactccttcattgattcaaacacaaactcaagtacgtaatatttgtctttagggatgccgaacgcttgagcaaaatcatagtaagtttcataccaaatgtcgttttccatgcagtaaagggagagcagattaatcgcaaaacgattagctgagaactctcctttttccattcctagataagcaagtttgtaatactcgggaacttcttccacaacatgaccgatttcatgtgccagcatgaaaggccgctcgttaaccttatagtagttcgcattaaaaattattagtttaggattatgccagctgtcagatggagcggtttctggcaatttcttttgataaaccacgccaataccatgctccatgcagtaattcattaaccaagttattacttcgttcattattaatccttcttaagactttcaggatggtcttttacatattgctcagccaaagcgcggtacattccttttaagtcgtcaggaattttaccaccatatggcatgtctagatctaaccatgaaatgcctgaatcattgtcagtggggttaggattattagtatttccaagaagataatcagtggaagtttttaaaactttagctacagcggctaaatcaactcctttgggattttgttgctgccatttgtaaatagcatttttaccaagaccagcttcaatagctacttcttgaagatttttatcaaactttttagataatttttttatcctttcaaatgttgtcatatcaacgtttctcccaaaaatagcaaaaataattaagctaaatagctaaaatgatctttacatttttagccaattagattattataattgcgtaagttaaattaatagaaaaaaacaactcaagaaacatagcaattttaatagttggggaactgttttaatgccttatttcttacacctatagtttatatctttggctaaaatatgcaagattttttctatgtttttatcttactaaataaatatgaaagaaggtgagataagtgaaaactattatcggcgcaatgaaaaagaatttagaagaaatcagtaacgaaaaatattcttatgaaaccagaagctttttagctagtgcacaagaatatttagccaaggctttaatacaaagccttcaagctgaagatagtaaaaaagaaaagaccatctaagtagatagccttttctaagaattattgatttagacgattcatggctcgctgatattcagacttgaagcgattaatatcccatgcaggagtacttgtaggattatcgcttttcaacttttcagccaagacacgaataattgcaaccgactttgcaatctctttattagataattctgaatccatctaattcacctcctaattatgagatgaatctagtttaccaaatatagaaaggaagtgatcatatgccatcaacaatgccaggccgagagctggttcaaaatttccttaaggataatgatattaagattactgatttagctaagatgtataagctttcgaatcaagacgcacgtgactacgtctcaggtcgcaagactaatcctgcagcaaatcgatttatcttaacagtcattagtgattttaaccttagatagaaaggagcattaacaatgcaagaattaatcaaagttcaagttcacaatgatcaacaacttgtttcagcaagagacctatataagggacttgaattaaaaattagattcagtctttgggtaagcaaaaactttgacagctttgaagagggacaagatttcaccagcgtatccacagatacggaggtatcaaacaacggtggtgttcaggttagaaaacttcaagactacttgctaacaattgacatggcaaaagagctttgcatgatgtcgaaaactgaaaaaggcaaagaagttcgtaaatatttcattgaagttgaacgcaagtggaataatccacaagagattgtcaaacgtggctatgcaattcttcaaaatgaaaacaccagattgaagctggagaacaagcaaatgaagcctaaagctttgtttgcagatgcagttgctacaagtaaaaatgatattttaattggtcaattagctaagattctacggcaaaacggttatgaaacaggacaaaacagactgtttaaatggctacgtgaacatcactatctttgctctaaagggctcaaatacaatcaaccaactcaaaaagcgatggaactcggtttattcagagtcaaagaaagaacagttaacaacccagatggcagttcacgaattactgttactacaaaagttacaggcaaaggtcagcaatatttcattaataggctcttaagttctgagcccactcaactatctctagagattgaaggtgtataagtatgcaagtcacaattccagaaagagtaatagctagagcgattcaacagcaatattttaataaaactgaagcagctaactattgcggtgtgagcaagtcaacctttagaaattggctactgaattacagtgatgaattaattcctttaagtgtggatggtcaactgctctttagcaaagaaacacttgcagattttatgaaaggacatgagatgaaatgaacaaaaactactatcgtgagttcaacaagccaattcgtaagaacgatttagatgataagcttttaaacatttttatcggtgtagtgattttagccttgagtcttttgtcttatggcttttgggacgcagtttttcaatggatttcttaaaggagagataaatggaacttagtaaagaaactaaagataaattgtgggctgctactgatttagtaaccacgatttatgacttaaacaaaaagaaaactaccagccatgatgtggtagttctcaagtaaaacaatcaaaggaagtataacacatgaaagtaaaatcagaaaaacaactaagaaaagaacgtcaattcattcgtaatcaaagagaggacgaaaggcttaagggacaagatgtgattgtttgttactacggtgatgagcgctgcacaattggtcaacatgaagaatttgatacttgccgtgattttatcatttggtcaattgtacaagaacctgaagtggctgcagaagacatgggctttgactcaaccacagagatgtatgcgtggatgtttgaaaatggcactgacaatcacgaaatgaagcaattagtcctagactactatgacggaaaggacatgcaagatgaataaagatctgaaagactttcagaattggattgagaaaatgaaaaatgatgcagatgattgggtaatttacttgatctatcaatctaaaaagaatggcaaaacttattcaggtgcaatgcggtggcttaataaaaataagccagaattgccaggtaaatttactgctgcaccaagtgaagtagtcgctaatgtagtgcgatcaatttacgaagaagcaatcattaaagtaaaaaatgaaggattggatagagaggtagataacgatgattgataaagactggttagaagatagtatcaaggaacaagcacaattaaagtttgctgctagatgggaaaatgcagagtttgattcgtctgaagcaagacaagcctttcaagcaatcaaaaatactaatgagtgggctatgtttaagcaagtaatgattaaagcatatgaaaaagcaattactaacaatgtgcttaaccagcttcagggtattaaaaatttgattcatgacgcaggtgaagaataatgccagcatttagttggaaagaagaagtttggaagccaattaaacactttgaatcactttacgaagtttcaaattttggaaggattcgtagtctgactagaaaagttaagcatggcaattctcacataaccatctatggaaagatgatgaagcaagtacctaacgaaaaaggctatttaatggtcagactttctaaaaatggtaaaggaaaaatattcaaagttcacagattagttgctcaagcatttttaaataatcctcatggataccaagaaataaatcatttaaatgaaataagagatgataatcatgtttcaaatttagaatggtgttcacattctcacaacttaaattacggtcatagaactcaaaaatttattcaagctgttagtactcctattattcagttatcttcagacagccacagaattgcagcctattcaagtgcaaaccaagcttcaaaaattactggaattagtcaaggaaatatctccgctgtggtaagaggaaaaagaaattatgcaggtggatataaatggcaaaagttagaaaaagaggtatcaatgaatgcctgaaataaatattcaaacattggataagttgaaaaactggcgtgtgcttatttatggaaaacaaggaattggcaaaacatctactgctaaattcattccaggtaaaacttatgtattaggttttgataagtcctttaaagttttagcaggtcatttagctggggcatggcaaattgacgctaagaaaccaattgaagatctaaacaaatggttagagtcattcgatccaactaaatacgataatttagttttagatgatatttccaatttcgaaaaaatttggtttcaagaaaaaggccgagaatcaaaaaatggaattagcaatgaattacaacactattctcaatggactaattacttcttgagatttatcgaatggatttatgacatgccactaaacgtatatatcacagcatgggaaacagagcatccaataactacagcttccggccagcaattcaatcaatatgggccggaactaagagattcagttcggaatgttttaatgggcctatccgatgtagtaggacgaatgattaagaaacctgatgatggaactcgcggtgtaattcttgatggcgatgaagggacatatgcaaaaaataggcttgaccagcgtagaggctgcaaagtcgaagatttatttaagtttcaaaaatcagatttagacaaagcagtagataaagttaaggagaaaaaataatgtttagtgaaaatgtaaatgaaaagttaaagttggataaagaaatggaagacaaagtaagtgcaacttgcatggatattcttaacggcagaactaaacatttcattatcgtcggtttaaacgatgatggcaaccagattcaaatacatcatgggcatggtgtcgtgttagctggtcttgtcagaaacattcaacgagaaatcgatgaagaaaatgatcataccaaaaatgccaatgagatcatcaagatgatgcagaaaattcataagcaagatgattaaatgtttcaattatttgattatcagcaagacttagttgataaggctagaaatgctctagcagctggaaatcaaggcgttttaattgttagccctccaggatcaggtaagtcagtagtaatcagtgaaattgctagattaacagtaaaaaaaggtggacatgtattattctttgtccatcgccaagaactagtaaagcagataaaagattctttcaagcagcaaggcgttgatttaaatcattgcacaattatgaccgttggcaaagtagctaacagattaaaaatacttccaaaacctaatttaataattgtggatgagtcacagcactcaagagctaaaacttatttgaaaatctttggttactataatgatgtccctagacttggttttactggaagtccttggcgactatctggtaaaggatttaaagatatttattccgcaatgattgaagggccaacaactaaatggctaattgaacatcacaaactagcaccatttacagtttatggctatcaattagggaataaagacttactaaaaaagtccagcactggtgactataccagtaaatcaatggatgatttcacaaaaagcattattcatggtgacatcgtaaagtcctggcttaaattcgctaaagatagaaaaacaattatttattgtcattcaactagctttagtaaaattgtggcccaagaatttagaagcgctggaattaacgccgcccatgcagatgctaaaacgccctctaacgagagaaataaaatcatggatagttttaagcaaggacaaataaaagtcctctgtaacgttgatttggtgtctgagggttttaatgtaccggactgttcatgtgtagttttacttagacctactgaaagtcttgtagtttatttacagcagtcaatgagagcgatgagatatcagcctcataaacaagcaatcattattgatcaagttggaaattttgaacgctttggtttacctgacactgactataaatggagtttggatgatcgctctaaacatccacacagagagggtcaaagtgctgatggaccggcaataaaaacttgcccagattgcttcggtgtaattagagctgaattggtcacttgtcctttatgtggtcatgatttttctgcagaaattagagaaattaagcagaagaaagaacaagaattgcaggcgattaaagcacaacaaatacatatcaactatatctctactaagaagccagaagaattgaccaactttagagatttagcaatttacggaaagatgcacggatataagccaggttgggcctggtatcaagctaaaaagagaggatttattaagaaatgaatcaaattttagaaagtacgtatttaaaagatccagaacagtggcaaaaagaagccaatttacagggtggtcttgaaatttgtaatagcgatactggttggccaatcggcgtattaaaaccagacggtattcaatattactaataaaaaaaggagaactaaaaaatggcaggatttttaaacgtagattataaaaaagcagtagataactcaattttacccgcagggacttatgaaatgggcatcaactcagttaagggcgatgcttcacctggtggtcatgaatgcatggtttttgacatgatcgtgcgcaaggacttagacaaggtacctgaattagctaaaacaaacgctaagcatcacggtcaacatttattcgtcagagtgtggactgctaaagatgctaatggcaatgacagcggctcttacaagtcatcagatctaaattacattgctaaagcagttggcatccctgatggtgcagatattaaaactcaagatgattttatgaaaatgtgtgaaaacagaaccgctagagtacaagttggcgttaatgaaaatgaatacaaaggtgaaaagcgtaagcgaaacagctgttttgtaaatacttggaaaccaactaagtacccacttcaaggctctcaaccaaaagaagacccattcaagggcaatgcaggtagcgacactgaaattaatgataatgatttaccattttaaggatgatttagatggctaaatttacagattattcatcgattcctgatgaattattaaatctcaagcaatgggggctgtttcaattgaaatggctcccagagcgagaaaaatacacgaaaattcctaaaaatccttataactttggtgcaggtaagtctaatgaccaacgtacttggtcggacttcgagactgcattgagagctttaaaaaaatatcctcaagcagatggtttagccttttactttgctaatggctttgtaggtttagatattgaccatattgatggtgatctcactgattatgaagagggagatacagacgaaaataatttagttaatcgttttaaatctttaactaaaggctcttatatggaagtctcacaatcaggtacaggaattcatgcaattttcaaaggcaagattccaggtaagcatagaagacatggaaactatgaaatgtatgaatcaggtcgattttttgccctaacaggtaacacgattggaaagccagtcataaaatcacttgatgaatcagagatgtctacactttatgaattttgctttggcaaagataaagttacgccgctgcatcccgaaaatgatagtgatgaaacaattgatctatcagttactgagattattaaacgtgctgaagaatcaccaaaatcaggtaaaaggttcactttgtttatgcaaggcggctgggaacaattttacaattctcaatctgaagctgatatggcttttgccaatgatctagctttttggtgtggacgtgacatccacaaaatggatcagatttttagaaactctagtttaattcgtgataagtgggaccgtcaagacggtgttactacttacggccaacggacactgcaaaaagcaatcaatgagacacctaatgtttataatcccagctccgaaaatactggaaactacattttcagtttcaacgagaaaaaacaaaagcctaagtactatacccaagatgatatgggaatggcacagcaatttatcgatagatatggcaaaaattttctttactcatatattgataaagaatggtatgtctacaacggctcgtattggtcaccagacacaaaaggctacattgaaactgctgctgatcatgtgattaaggatttagctaaagatagacctaaaattgatccatctttacctggaaaagaacagactaaaatccttaattcttggaataagtttgtaaatcatgaacgtagtcataaagctaaagtcgacctagtcaaagaacttcaacaccgtttgcctgttactcactcaatgtggaatcaagaagacatgttgttgaatactccaagcggctatgttgatcttacaaatggtaaactacatccacacgatattagtaagatgtttaccgctgaaactgggtcagagtattcagatacaatcgactcaccaaactggcgtaaatttttgaaacaaatttttcaaaatgatgaagaagtaatccattatgttcaaaaagctatcggttattcatttactggttcaaccaaagagcaagtaatgttcatcccctatggtaatggtcgcaatggtaaatcagtgcttttagatacaattcaggatgttgccggtggctatgctaagacaatgaatgtctcatccattatgactaagtataattcaaacggcgctaactcagacatcgctcgtttggaaggtagccgaatggttataagttctgaagctaatgaaggccaacgattagatgaaggattagttaagcaacttactggtggggatcgaattgtggctcgtcagcaatatggtaaggaattcgaatatcaacctagctataagatctggatggctactaaccacaagccactaattagaggtactgatgaaggtatttggagaagattaatccttattccatttgaataccaggtgcccaaagataaaattgatcgcaatctaaagtacaaacttgaggcagagagtatgggaattcttaattggattgttgaaggtgcaattatgtggcaagttgaaggcttgcaaatacctgagcggattaagaatgcttcacaaaaatatcgtgaagaaatggatgttttatctggttttgtcaacgactgttgtgagcttggacctggcttcactgctaaaagtggagagttatatgattcttacaaaaattgggccgctgatgccaatgaatacaagatgaatttaacaaggttcggtaaagaaatgagtaagaaatttcatcgaaaagtatcgcacggctataaagtttatgaaggtattcgtattaaacaagatactagatttgaatggaatgggtaatacttaggtgatagattggtgatagtttgaggtgacactttaaacttagagccacaagactttaagaccatttaggtgatagttttggatttttttactatttatattattttttcttttcttttctatataagaaagaatataaaggaaactatcacctaccatcaccttgcttagagccacaagggattaagcctatttcaactatcacctagaactatcacctttagaaaaatggagtaaaaatgcaggtaaaaatagactttaaaaatggcaatagaactgttttcaatgcagattgttatgatgcgagtgatttaagacgtgatcttgctcaacaaaatgcaaatggaaatcacttcttttatattagcggatataaagaagatcagcttatagtagatattcaatccatacagtccttaatcatctcacgataactaaattcaaacaaaacaattggcattctagtgacggtgctgaaattcactacgatccattcgattgtggaagtcactttaaggaaaggagtatttagtatgtgtaaatactgtgaaattaatccgaaaactaagctaggacgtgattattacagagatgactatgttgatccagatgagattaataaggtgaatggtgaagacgaaataatgtttacttacatcgattgtaaaaatcatccagctttaattatttctcatcctgatcctgaatgttattctcaagaaatagacgagatttttattaataattgtccttggtgtgggcgaaaattaacgaaggagcatgaaaatgaaagatgaaaacggacgtgatattaaattgggtcttgaagaagctagacgcataatggctacagattactgtgtaagatcagatcttgctctatgtggtgagttctttaatgaatatggtatgttgcctcaggagtacataaaggagtatggcaatgaaagtaattgataaaagaacgaagaaaactaatgaggattacaagtatggtgatattttaatgtgttgggataatgatccagatgaatataatctgtttagaatctcgactttttatgatagttattatgaacaagatcgttgtattgttgtaactatacacagtagtagtgacaatgaagcaaaaacttgggaaggattatttgactcacctaaagaagcggctagggacttaaagaatagttataaccacgctgaaaaagtgaatgcatgcattgtgattactgattaacggaggaataattatgtgcgattactgtaataatgaaaaatcaattatttcaattgaagatacatatgaagatgggtacacaggtattgatagatatgaaaatggaaatgtttatattaatggaaatgaattaaatttatcttgtgatgtcgaagttacttatgtatcaaagagtagcaagattaactattgtcctatgtgtggtcgtaaattaacggagaaaaactaaaatgcacggtaagattattaaatttaaaggcgatatttcagaactagacactgcaggttatgcaattctaggtttgaaatatctgggggagcacaaggatgaataagatttataaacttgaatatttcaataaggatagcggacgatgggaagcaatgagatctaatagataccctggtgggttcttcctagatgctcaacttgctagaagatcagctggtcaatcaatatatagagatgttacagatttgagaattttagaaattaaatttaatcctaatgatgttgatatgactttaattcctaaaaaggagcatgaaaatgattgataaagagttatttaatgaaggaattaaaactgttgaatctgaattaaatgatgttaaaagacaacaacagcattggaacaaaggacataaagttaataccagaaagctttatttaaacttaaatgctactatgctaacgcttaaatttttgacaaatgaagcggaaaaagaatttttaaaagaaacacaaaaggaacatgaaaatgacaggaaaaacaattaaatttcaagcaacaacaaataactttaaagttaatggtaacaaagtggttttgcaattagatgcagacttgcttactcataagattaacttaaataagcttaaagacattgcttttgatggcaacggagttcaagtaagcttggaagctgatcaacaggaacttattcctgaagaaaacaaggatagtaagccaatgctagttagggatgacaagtaatgaaaactgcactgcttgtattatttgcaattctttaccctacgataagtgtactgaatttgttttcagattataaaaccatgaagtctaacaacgatcttatgaaagaaattcataaaagtaataatttgtttgactctttattaaaagaagttagagccaatgaagatttaacaatagcaatcaaagacagaactaatgcccaagataattttgtttgggaatctgttttaattcttgcacgtcgtattcatgatttggaggacagtaactatgttaaataagcctatttcacatgacaaaaatgggcgaaagatttatcctgattcattaatttatgatgcagttgctaatgaatatttctttccagtcaaacgaaaaggcatttggggtgatgactttatgggggatttttattcattaactccagcacaattaattctgatgaaaaagcatgcaactatggatgacatgaaaataattatgcatgagaaaaatgaatcagacgcaatttttaatactagaggtaagtttgatggaaagtgaacatagcatacaaaagaaaattgaattagttgtctcgcaacatcattgtcatatttttcgtgctaacgtcggtaagattagaacacctgatggcagattctttactacaggcttgccgtctggctatcctgacttacacggctggcgtgattgggatcatcaagctttttatattgaagtgaaaaatgctactggcaaaccgcgtcctgatcaaatagcttttcataaaatgctaatgaaattcaatgttattcatggaattgcacgaaatactaatgatgcacttaagattgtggagaatggtttagttggctacggatataaatagaagaggtgaatattatggaagtaacaattgacgcagatacttatgaagaattaaaagattatgccgatagactgaatgaaccaatgtcaatgattgcaactaaagcaattaaacggtatatcgatagctattagttatgaagtataatagatatattacgaattgttatatatctattatatggagttggttattttgaatttatttgctgaagtaaattattctgctactgctaacaatgttgatcgatttctatctaaacaattgcctagattattacgaagatgcggacatgatttaatagatttatcaagtcctaaactatcatgggcaccaagccatagtacgggtcacaactatgctgaaacatctatagttagtgctttatctattgaacaagtaataaaagctatatataaaagtatctatagttgttcagaattacataagacagtattaatagataactatgtttattgctatgatcaagaacaaatcattaggatgttgccttatgaaaagtcacagtactataaccgtatcaagcctgattcactgcttgaatttgctgatgcgtacgattactatcaacagcaatgcaatgtggatgatgacaatctcattgaccttcgtgtttatgcatgaatcggaattctatcggaaactgtacggactttcatcggagatcgatcggtggaatttggttcataattgatagtgtcgaaaagtgaatgaagttcgacaaactatcttaggtttttcttcgcatggtcacggttcgaatccgtgatcatgtttaggaacagctgtatttattaactgtcgtatttcaattgatgctgttccatagcatgcgatgacctataatcaaacattaccgcatattatttatgaatacatagcgagcgtgcaaacatgagtcgacttaggtcggctttttgttttgccaaaaggggtgagttgatgccacgaattagacgctgccgttttccaggctgtcatgctgttgcttatgtgccgaatcattattgcaaaaagcatattgagcatgaagcagaactgcaaaaacgtaataatttttatcgattccataggtataacaattcaacgagacaaagatattacaacaaagtagttcgcaatcgcaatccaattaaagcagaacagaataggttttatcattctaagcaatggaaagacatgcgacttatagttcttaaacgtgactatagtctatgccggtactgtaaagcactaggtaaagttaaagagggcaatgtaatagatcacgtcttgccagtagagagattccctgatcacatgaaagacttacaaaatcttgtcacatgctgtcaggaatgccactactggaaaactcgctttgaagagcaatactatggcacgggtttgcatggaaaaccaacgaaaaatccaccggtaacggatgttaaattgattgctagcttatttaataagttacgtaatgaacatgctctaaaacgtaaataattgcgttctaagcgattttatttttgcaatgtatgattgcacatgattgaaattattttagcccccgggccattcgggagtagagtggagccgcatcagtgccattcgcttgtgtcacaaaaacaatttggaagttttacaaaaggggatgaaagtttgacaaaggttgatttatcaatgcctaaagtacctaatcaagcaccgaaatggcttggaacttacggcaaatatttatatcctaaattagccacttatttaaataaaagcgacaaaattttaagagctgatgaatatttattgcagcagtattgttctgcttatgatgtttatcgaaaatcatatgatgaaattattaagcatggcgtacaacaggcaatctataaaacttctctttcccctgtggatggaacagtggttagtaaagattttcagggatataagaaaaatcctgcttataacatgatgtccgattcactaagtaaaatgaatcaaattggaaaagaattgggtctaagccctaaagccagatcacaattaatggaattgaaatctgtggaaagcaatagcaaatccatggctgattcattaaaggatttcttttctaaataaaaaaacgaccattattggtcgctttcgtttaagagcttttgaactgcttgctctatgagtttagccgcacttgtgcgtttttttattgctaagatttttaaattttcaattaagtcttcatcaagtgtagtagtaaatttctttttcatgttttgcctccttaaattcattatatcatatatacgtgtcttgcaatagcacgtaaatacgtatataataaatgtgaggtgaaactatgatagaagaaaaactgaagcaagaaatggttgattacctgctattaaaacaagaaataactgatttaaaagaagaacaaaagaaaattgagcatttgctatctacaaatgtgtcaaaagaaaaacaacaaagaaaaaaatttattcagggcaaacaattctttataaacaaggcaaaatatataaagcatttagaaaaaatacatccacagataagatatatttcaggttataaaatgcgaaagcataaagaaaaatcatcatttaaggtattagttcaagatagaaaaactaaaattagattttatgttttatctaatagattgcgccaacacgattggcaatgcaatgaaattggtgctttaaacaaagcaaacatttttactgaagatttacagaagtgggttcttttaagaaaaaaatataaatatgacaaacgtaaacaaattcgtccaatcacctttagacaatgccacttatgtggaagaacatttgagtcaaaacgaggggctttgctttgttctaatgaatgtagacgaaaatggagcaaccgaatgagagaaaagaaacgctcaattaggacaaaaagagctaaggctaatggaaaatacgataattcaattacacttgaaaaattgtttaagcgtgataatggtatctgctatatttgtggaaaacatttaaatttaagtacttattacaatagcccagatgctcctacaattgaacatgtgataccaattataaaaggtggaacacatacttggaataacgtcaaactggcatgtagagcatgtaattctattaaagggacaaaaatatctaaagaatatatagaaagagcttcttaaagaggctttttttattttctaagtaaatcacagaatcgctgtaaccattgtttagcaagcattctgcatcttctcaattaaattatggaggtggtaactgcatgaaaattgatctaacacaaacgcatgatgttttgggtgcttatcaatcgattaactggactgacataaaaaataaatatcaggatgacggaacaaaatactgttttgaaatcttaaatgaaagcacagtatctggttatttaatgaaactagcctgttttaggaacctttgtgatttaaaaagacaaggtgagccagattttccatatcattatgatgtcaaagaagtacaaaacacttttaagtttgcttcaatcgttcctgatgtcgacttgcataagccgcttccattgatgctatggcagaaatttattttggctatgattaatggttggaaagaccaaaatggtgaacgcagatttactgacatccacatttcagtaggacgtggacaaggtaaaacgcaaattgctggtgtgcaaatgtgtaaagctgttttaattgatactcttaacttcactaacaaagactttttgattactgctaatacgagtgaccaatcaactaagttgtttggttatgtaaagaaaatgctagaagcagtgattaaaattgagcctttcaagtcactagctaaagaagctggtcttgatcttcaaactaaccaattaattgaaaagagaactaacaacaaagtttggaaaatttcttatgaagctgataaatatgattcaactcacaatgttttagctatttatgatgaaactggcgcacttgatacctatgaccgaatttctgatattacagatggtcaaggacaggtaaagccatatcatcaattcattaagattagttctgcttatcctgatccaactagtccatttcaccaggagcaaatcacgatgcagcatatcatggagaaagactacagtcgtgaaggtgataactctctctgtcttgtgtgggcgcaggatgatttggacgaaacttttaagccagaaacatgggagaaatcaaaccctttaattggcttatctaaagaagagcaagagcgtagaactagtaatttaattaaacaacgtgatcaagcaatgcttgctaatacgcttcataagttccaaaataaaaatttaaatgtctggttgaaacaatcaactgcaagctatcttaatttgaaagatgttgaaaatgctattgatgatgattttaaagttgatggtagagaggtttatattggtttcgactactcaatgtttagtgataatacagcaatcggttttgtttacccttatcaggatgaaaagacaggtgatccacgttggcacatagcccaacacagttttattccttggcaacaagctggatcaattgaagctaaggaaaagcaagatggcattgcttatcgaacttatccgaaatattgtacgattacggcacatccacaaggaattattaatcctgagcaaatttacagatggcttttagattatgttgaaaaacatagattgaaggtcgttttttttggctatgaccgatttggcagctatcaggttaaaaacattactgagagtttaaatgctaacacaggatggctaattcaagatattgcacaaagaacaagtgaacttgctaatccaacaaaatttttacaagaaagttttgcaactggtaagattactcgttttaatgatccgattttggaaaaagcattgcttaacgctgtagttaaagaagataagattggtattcaaattgataaagacaaagctactttgaagattgatgctgtggatgcattgatagatgccttctatcaagcgatgtatcattttgaagactacggcttgataaatgataagtcacatgaagtagagcgcatgacacaacagcaagtccttgactggtttaataatcctgattcaggacttttaggaggtgaagacagtgacgattaaactagtgaaatatatttggaaaattcttgatttattactttatattctgggttttggctgtatagtcggagctctatttttatggaatctaatcgctggttggtcaggattagggatttctttgattttgactggtcttttaattgatcttccctctataagtcagaggggaggtgattaaatttgcctttatttaaaatgaaatctgagacttcaaagcagtcattaactttgagtgatgatgatattgttgatttcttaactggcaaatcaagtggaaaatatgtttcagctactgaagctttaaaaaattctgatattttctctcttatttctcagttatcagcggatttggctttagttaaatatcaggcagatacttctagggcacaatctcttctaaacaatccatctaagacttctaatggattttctttttggcaaggaatgtttgctcagttgctcttagatggcaatgcttacgcatatcgttggcgaaacgttaacggtgtagatttatactgggagtttttaaagccatcacaagttcaagtagagctattacaggacggatctggtttggtctatgatgtcaattttgatgaaccatcaattggttatgttcaaaatatttctcaaaatgacatgattcactttagattgatgtctaatagtggtggtaaagtggggatttctccgttgaccgccctgaccaatgaattgagcatcaaagactcaagtaatcgactgactttgcatgctttagatcaatcaattgaagctccaggaattttaacaattcagggtggtggtttacttaactggaaaaagaaggctgctaggtcaagagaatttgtaagacaagctaataattctaattatggtccaattgtcttagatgatttggaaagttatcagccattagaggttaaaagtgatgtagctaaactgctctcacaagctgattggactggaaagcaaatagctaaagtttacggtattccagatagttacattaatggccaaggtgatcaacaatcatctcttactcaaataggcggtcaatatgctaagtcacttaatcgttatgtgggtgtaattgaaggcgaacttgagaataagttaaatgctgaaattacatctgatattagacctgctattgatgcaatgggtgatgattttgctactactatttctaatttgattagtagtggtactttatccgaaaatcaaggacgatatattctacaacaatatggttatcttcctatgaacttacccaatgaagggggtgagaatagaaatgaagaaagttcaaatgaagggcgtagtagttcctaatgattacaaagatgtttttgattggatgaataaagacagttttagtccattgagtattcagaatcaacttgatgatgctgatggtgaggatattactttagaaatcaattcaccaggtggttacgttgatgcaggatcagaaatttatacagctttaaaagaatatccaggtaaagtgacagcaaatattgttggtaaagtttgttctgctgctagttggattgctttagcggctgatcacgttgcaatgtcgccaactgcacaaatgatgattcatagagcttcaggaattgctcaggggaatgtggacgatgtcaattcacaagcaaatgctttaaacgagctagatcaatcttttgtagatttatatgctaaacgaacaggcaaaacaaaagatgaaatttatgacatgatgaaatcaaacacttggatgaatgctaaaactgctaaagctaatggttttattgatgaaatcatgtttgaaaatgaagcaccaacagtagtaaatgcaactggcggactgattcttaatgatcaaatgatatctaaaattaagaatctgcttcattcagagtccagtgatgacactaaacccacaaaaaataaaaatgaaaaaccaaaaacaaagggacaatctaaaaaggatctgtcccttttgttatgggagtagaaaggaaaatttatgaatatcaatgaattacatgatgcatggattgaagcaggtaataaagttgaaaacttaatgaatgacaaacttgcattacaagcaaaatataatgcaaatcctgattcagttactgtagatgatatgaagaaagctaacgaaaattataagaaagctgtagaagctcggaactttgctaagcaaaattatgaagacgctaaggcaaacttaaagccagcagctaagaaacctgttaaaagtaattcttcaaatgctaagaagacagcagaagaagttatcaataagtttgctagtgattttactaacttagttaaatctggtgatttaccagatggttctaaggctagttcaaatgctggtttaactattcctgatgatgttcaaactgcaattcatactttggttcgtcaatatgcatcacttgaaagtttggtaaatgttgaaaatgtttcaacttcacatggatcacgtgtatatgaaaagctagctgatattactccattaaaggacttagatgatgattcagcccttatcggtgacaatgatgatccagtattaacagttgttaagtacactattcaccgttatgcaggtattaatacgattacaaatactttgcttaaggatacagctgaaaacttgattgcctggcttgaaacttggattgctcgtaaggacgttgtaactcgtaaccttaagattcttgaggtaatgggtaaggctcctaaaaagccaactattgcaaagtttgatgatattaaagatcttgaaaacaatactttggatccagccattaatactacttctagctttgtaactaatcaatcaggttacaacattttgtctaagcttaaggatgctgatggcaagtatttgattcaacctgatgttactcaaccagataaatatgtgattgatggcaagttagtgaaagttattgctgataagtggttaccagatgtctccggttctcaccctctttactttggtgatttaaaacaaggtattactttgtatgatcgtcaaaatatggaaattactttgactaatgttggtgccggtgcctttgaaaacgacactactaagattcgtgttattgatcgtttcgatgttgaattaattgatgatggtgcatttgcagctgcatcttttaagactgtggctgatcaagttaagggcacttctgacacaggtaagtaatagataggaagtgatcaattatgaccacttttttaactgtggatgatgagttcaagcggacattaggttacttgccggatgatgatttacttgatagccaatctttgcagcggatggaatctgcactaactgcagctgaaatttatgttcaaggcgcaattggtgaagaaaatgaagatttttataaagatgaaaagattttgcctttatataaattagcttgctatgcaataggtgctaactggttttctcatccatccactgctgtatcaagtataactgcaaaggcaatcattggtcagcttcgtggctcttatgatgaaaatgaggtgaatgaagacggttcaacttcaaaatcctgatcgacttaatatgtcaatcgaattaggttatattgaagaatttactgatgaaaatgacaatccagtgattaattttcatcgtctcatccacactaggtgtggacggtggtcaccaaatactagccaaatgattcaaaaagaagggttgaatttaactcactctcatattgtggtagttcatcataaaaatgattggaatggtattactcatgctaaatttaatggtcagctttatgaagtaactttgtttaatcaagatccttactttaatcaaacagcttatgatcttatatctttgagagaggttgagaaaaatggttgattttgacaaggggcttgaaaactggttaaaaaatgttgaggaacatgctagtttgtcagcaactaaaaaagctcaagttactggtgcaggcgctgcagttttctcacaaattttaaagaaaaatacgcctatttctggtgaaagctattctaagggtagatcagtaggacatgctaaaggtcgaaaaactaagcacttgaaagagtcaattacttttaaaccaggttttaatcatgataagttgcccacaggtgatactgcagttggttttgattctaaatactcagccttagttgctagatttgtaaataatggtactcgtgatatgtcatcaaaagagcttaaaaatatgcatttttttgataagtcacaagttgaagctcgtgacgctattttaagggctgaagctgaaaggatgaaacgattatgagtactctggctaaagaagttgctgatgagttacaaaattcgggaatcaaagacatcggaattgtcagctcttatacattgccatcaactggcggcatagctgacaagcaaaacaatatcttggttactgaagtaactacagtccctaacgagtatggcagcaatcaatttactcagactgatgaaacgatagaattaaatatttactatggaactcaaaaaacggttcctattgacacttttgaacgttcaattgtgtctttttttacgcaaaaaaattggtctttattgccttatggagggcattacaaagatcctactacaaagcaattatgtattgattttcaatttagaaggagaaaaacatggaaattcaaggattaaatgatttaatcgtttggacttatgataataatcaaaagattattactgatcctgatcaaaatggatttgtttatgatggtgataagggtaaggtttttgatcctaagactcaaaaacaaattccaggtgtttataagatggacttagcgtctgtatatggtgttactcaagcaaacattactggtcttgctccatcagttcaaaaagtttacggttctaattttgttgctgaagtaaatcaaggtactgaacaacccgcaattgctatggcagctaatgatattccacaccttgtttatgacttgcttactggcttaaagaaagacaagtttggcggttatgctcgtaagggaaagtcaagccctaagattggtggggttattgcacactcttacaatacccatgctggagttgatttctactttgcatttccaatgggcatttatgttcctggtgaacttaacatgcaaacaaacaatgaaaatgcgaatgttgttcatgatgcattaactcttaatgctcaagcacgtggtgttgatcaattgctttatgaaaagttctactcagatgaaaaggatttcgactacgctaatatgatcaactatattactggccaaacaactgtggatgtaactgcagataataagcaagctacagatgttcacggtacgccaactgccttaggtaagtaagttataagttgggtgggtagtggtaggaatttaatagctattttttaaagaacggttaatagccgttctttttctttcgaaaggattattttatgtcagtaaaaattaatggtaagaagttacatttaacgacttttgatgtacctacaaatggtaagaacattagacgttgtttagttgctcaaaagaaatttgcggaggctgatttagcaattaaacgagtagatacagatgatgaggaatcaattattaattcactagaagctcaaattaaacttattgattcttatgtagaatttcttaaacctgttttgagcttatcagacgctcaagttgaaaaggtagaaaatgctgattttgaagatgttgttgcatttactactgaagtaattgacaaggtgcttaaagtagatagttccaaaagcgacgacactaagtgatgaagaccccgttagagcttatcaacaattaattgaagactttgattattctgaacaacaaatgatcctgaatgctcatatgtctgtggaggaattcgaggatactgactattacagattgattgaaatcatgaacgctaaacctcgtgataaacgtccaaagatgttatgggaatttatggatgaattagatggtaaaaaaggaaggaggtaaattaaatggcaggatcaattccagtaggttcactggttactgatgttaagttaaatggtagtcaacctgttacaacgcttaaagaattaaagcaagccgtttctggtgcaacttcagcatggagagcacaagaagcggttttaaaatcggctggtaaacaaactgaagctgctaaagctaaatatgccggcttaactgaaactgtaaaaaatcagcgcaaatatattgaagctttagctgataagcaaagaaatttgaagaaagttcaggctgaagctgatcaaactactgaaaaaggcaagcaggcttataagaatgctactgaagaaattcaaaagaatgctgcgcaaacgttacgtgctactactcgtcttgagtctcttactaaacaacaagaaaaagctaagtcttccttgaactattacaagtctggtttagctgaagcacaaaaatctttaaagcaaactcaagctgtaactaagtcttatgttgaaaggctaaaagctgaaggaaaaggctatgaatcagccaaagctaaattaaatggctataaatcttcacttgaaaatttaaataagcaacaaaaaattcaagctcaagaattggccagaattgctagtgaatctggtaagtcaagtgatgcttataaacgtcaagaaattaggcttaatcaaaccgctacgactttagctaaaactaagagtgcaatgaatgaattaaattcttcaatgcataaagctaatccgacagtttttgacaaattaaaaaccaagcttacaggtttagatagtcaagctgaaaaaactcatagaacttttaaagaagtatttatgggatcagcattaggcaatgcattgtcgaatagtttaagcaacattggttctagcttaaaaaatgcttatgaagaaggcatgaaccttaatttggctgttgctaaaatcaatggtcggtttaaaggcatgggaatgtctactagacagattcagtctttagacaagcaattaggcgaattaaaagctaataccgctatgactggcgataatgttgctaatttgcaagcacacatgctcaattggtcaacgattggtactaaaggtgctatgcaaatggctaagactatagctggtgtgggtgatacgtctaaacttactggtgatcagattgaacgtgtatcagctagtcttcagcgtgtaggttcaactggtaaagtaacttattccagcttaagtcgaatcactaaagcagcacctacatttatgcaagcattagctaaaggcgctggcatgtcacaatctaagatgattgctttacttaagactggtaaagtaacacaaaagcaatttcagcaatggatggctagtgcaagcaaatattctgatgatgctttcaaaggttttggcaaaactcaagctggtgcattaaagtcaatgcaggtcgctcgtcaaaaattggaacagcaatttactaagccaatttttaatgcaaagactagtggcttacaagctttaaagaatatcatgacttctaaagcagttatgaatggtgcccaacaacttggtaaagcaatttccaatatgattggatttttagataagcataaatccgatttagttggaattactaaagatgtcgtatccattggcgtagctattggcaaagatgtatggaaatattttgctggaatcatccaaaatattggtaaagctttaggaattgtccatggaaatggaaagaaatcaggggatgcattacatactctgaaattggctactgatggcttagcaaggaataaaactgctattcaatggattagtaaagctattattgctatggcagctgctaaaggaatcagcaaactaggtggtggcttccttggcatagctcgtggaagttataatgcatacaaaaatgtaaaagctttaagagctggttttactggcttaaaagattttcatgatttaacaggtgctgaaagatcatttgctcattttggtgacttaactaaaagagtattagatcatttgcaagatggctttaaagtacttaaaaacagcaaactaactagttgggcttctcaagctggtaaaaatattgtttctggtttgaaaaaaggtgctacaggtattggtaaagctagtaagtggattggctctaaactacttgaaggctctaaggcaattattgataaagcaactactttaggcactaaaattggtcaagcaatttctaaggctgttcaagcttccacaaagtttagcatgggtaagcgtctagcaactggtgccttagctggtgccgcagttgcaacccctgaagtgattaatgctgttaaggaccgtcactctgctgataaacgtagtcaagatattggtggtgctgtcggtgctgtggctggtggtgctttaactagcatgatacctgttgttggtccaatgcttgctcctgtgggtgcaattattggtaaatatgccgggcaatggggcggccaagcagttaacaactttaccaagggctggcaaaaaaataagccgccaaaaaaattttggagcttagaaaatttaggttggtctacccatgacacttttaacaaaataggtaaatggggttcagacgttggcaagaagtttggccaaagtttaaacaaaggtaaatcctttgttaaaaagaactctaaagaacttgctttaactgcagttaatccgattgttggtattcctaccatactttataagaacaatcccaagtttagaaaatgggctaatggagttgctaagaatatcaagggtggcttaaacaaagccaagaaatcaattactggatttaagaattcagtcaataagaactttaaaaaggcatgggattcagcttataagcatgcttctaaaggtactaagcaaatcatgcgtagtactgaaaagtttgctaaaaattacgtaaaaatcaataaaaaagctaattctgaaactatcaaaaactttggtagttttagtaaacggcttaagaagaatcatggcaatttgttcaaagcgattggccaaactgccaaaactcaattagcaattgagaaaaaacgctggtcatctaactggaaaaacattaagactactgcggctggtatttggaaggggcttaggactaatgcatctgatatgtatgctaagctcaataaatctactcacggtggtcttggcaaagtattcgatggctttaaagattttggcaaaaatatcggtaagttttggtccgatctttggaaaggcattactaagacttttgatgatactgtcaaaggtcttcaagatgctgcaggtaatgtgcaaaaattctttaccggtaagttaaaagtcggcaatttacatttagctggtggaacagattggcgtagtcgctatggggttccagctattgttaatgatgctccaggtaataattatcgtgaaggcttaattactaatggcgaggttgttccttttcctgctaagcgtaatctcccaatttggcttatgccaggtcaagatatcatcaatggggatgatatggccaaacattttggctctgctttacattatgcaagtggtacggttcatttatctaaggatcataggtattcgaagaaaaattatgaactggctaagaaacgtgctgttgaggacaaaaaagagctagaaaagctaggagataaaatctctaatgctttgaaacataaggatggtaatgaagctaagcgtcttactgcagaatttaataaactcactaagaaatattctgcagataaaaaagctgctaaaaaaccagatcctcatgctggtaaagttctcgttgatcagggcttgcttattggtgcaaagtcaagaattggacattctgtctatatcagtaaagacctattcaagaaattaattgccaatttaaagaagaagaagtctactactagacgtcgtacaactactcataaaagaagttcaactacagcaagaagaacatctacacgaagatattcttctagagttacaacacctagaatttctagtggtgtttctgctaggatttctactgtcggcttaggttcgattaacggcttgtctaaagcacttaaaggaattaagtccaaatctattaaggtggttgcaaaagcttcaggaactaaagcagttgtttcattggcaaaatctgttgataaggtcaaaggtagcagtcataaggttatcgttaaaacttctggacttacttctttaagaaagttagctaaagcagctaataaaattaaaggcaagactcacaaagttagagtaaggacttcaggaactaaaggacttaagtctttacaaaaaaatataacttttgttcataagagaattgattctttaagtaaggcttctaaaaaagacaagtttggtaaagctattgcaaagcaagcagaagaagccgttaaatctttaaagggcaaaggcaattttgctaagcagtttaattctatggttaaaaagtttgaaaaggacttaaaagccatggtaaaaactgcacaaaaagaatttaagtccatgtggtcgaacatggaacacagttctaagactagtcaaagcagtatgcttcattctttgagtagcttttctaagaagttcaaacatgattggagttcattacaaagcggtgtttataaatcatttagtcatttttggacaaatatgagaagtgccgctggtcgtggagtaaataacgttatcagaattcttaattctgcaattggcaaaattgattccgttatttctgactttggtggttctaagagagccgtaaagagtgttactccagttcgctatgctgaaggtactgatgcaaatggtcgcttaactcaagacactttagctatcgtaaatgatgctaaatctggtccacgccaagaggctattgttactgatcaaaacgatgtgattttacctaagggtaactatgtcccagtaatgctaagaaaaggttggggtgttctaaatggtgctcaaacgcagcgcttagggcttccacactatgctgatggtacaggactatcactaaagaaactgtatgacattgctaaacataactggaataatcctactaaaactggtaattcaatgtttagtactgtctctggcttaactggtgctatgaaagaattagcttcaggaatgcgttctaagagtaaagatcaaggcgtaacttggtggtctcaactttggaaaatggttgaagacaaagttaacgatgatgacttaggtccagcaagtggtttacttaaggcagtagaaacgttaggtaaaaacaaacactatagtcaaagcaaaagaatgtccaagttctttgccgactgttcgagtttggtttcaagagccttatataacaattatggagctaaatgggccgaacctaatggctgggctttaactgtagctggcttatgggatcatgctcatagaatatctaaatctgaagctaaacctggcgatccagtcttctggcttccagatactcacgttggtatctatgcaggtcgtggaatgtactactctgcatatggtcctaatgatggtggacctattggaatgcaacctgtgggctctggtgctacttttggacgttttaaaggcattaatactgaaggcagtgaagataccaaagaagctgttaaagtcaaagctaacgataggttgcaaaaacagattaaaaatcaagttggtcaagggttctggcatactattcaaaaaattgctgataagtatggtgagcagttcaatggtgctaactctatttcaggtagtatgattgaagccgctgcacgtaaaatgcacgttcatttacctgatggatttgtaaaagatgttttgcgtgttgctatgagtgaatcaggcaacagaaatatcaaacagcaaattcacgatgtaaatagtggcggtaatgaggctcaaggacctttgcaatttactcctcagacgtttaaagcctttgctgtcgctggtcacaccaatattcacaatccatatgatgaattgctagcatttttcaataactctgattggcgtaactctattggctggacgactatttggggacatcgtaaatttgattggcttcattctggtcctcaagggcatagacgctttgctaatggtggtattgcaaattcaccaagtgtttttggtgaggcaggaccagaaatggcaattccattaattccaagtaagtcaactcgtgcgtgggagttaattggtaaggcaattgcaattctttcagctaataccacctttggacaacagcaaaatcaaatagatagtaaagaacaaaaagaagagcacgaatttagacaatccgtgcttttacttttgcgtcaattggttaataagagttctgttgctaacatcaagctcacaactcctgcgggcagaaccttgtgggaagttgttgagccgtttagtaaggcagaacaaagagctgcaatgatcaaactaaggaggggattaagtgggcgttgagtattcaggtttaatttttcaaggcaaaaattcgcgtgatctaggttttacggtgcaatatccgtttaatctagtccacccgacagctgaccttgatgctactcacatcaaaggtcgtagcggtgactttttgcaagatgataactcttatcagaatgtcactgagactttcactgttgatgctgttcgaccatctaatgtttctcaatttgactatgagcggactctgacggattggttggcttcacctgtaaccatgacccaaagaaagtatcaatatttacaatttgatgctgatcctgagtatgcttacagcgcgattcaaaaagaccctttcagcctgcagtgggatgaaagtgatccttaccacgcaaccggtacaattcctttttattgtgagccatttcagtatcgtgtcgatggtattgagtacattccactgccggatactggtacagtttataaccaagaatccagaattgctgttccaaactggcattttattgctaatgggacattcatcttatatgtaaatggcttgccttatgagtttgacaatatgtctggtgaattttggctatcaggtgacacgcaggacacttatgacaaggacaataaactttacaatagccaggttaaaatgcctaatttaagcgttcctatacttcaaccaggtaaaaatactatcacgattactgcagaatctggggcaacgatcactaaagcagaatacatgccacgatggaggaggttgatatagtgaaagttacaattggtaaaattccagagataatttatacccaatatgatgagttgctatcttttcctcacttatataaatctattaatagtgactttactactccaggctttactttatctgatgcactaacttgcgatgttacttttaatttcaatcaatatccaacattacaaatgacatatccacgcgatggaaatcatatggaagaaattcaaaaagaccgttggattcttgaagattgtggatataagtttccacatcaaaaattcaaaattactcatgtaacccaagagttggatcaagtagtagttaatgctgaacatttgttggctactttaaatgactgtactttaccagacggattccaactagttaatgcatcacctcaagacttcatgaaccaagctttaaaccaaatggttccggctaaagatattatctttgacagtaaagtgtcaaaggtaagtaatgtcaatgtggaaggagctcagcaggttggttctcttctgatcaatccagatcaagaaggagatcaggcagttaactctataccaggactttatggcggtgaattggagtttgataataatgaaattcatcatagcgaacatgctggcatggatactggaattgtcattgactatggcaaaaatatgtcagagtttcaacatgatatttcaacagaaaatatgtggactggtgctgttttcattgcaaaatacatcccaggtcaggctgttgctaaagcagattgggatggctgggctagctggtccagtgattactcaaacgttgggatttatgcagcaggtggtacggttgaaatctttaactcacctgttgaaggtcatcaagcaattggtgccctttcaacggggatgaagcttcatcttggtacaccaattcatgacggcgattttacatcagatggaaaatatcaaattaataccgttaacggtgatgactggtatcctgtcgcaccagaagatggtggcggctttgtggatgctagatggatcagttttgataaatctggtagctatatggttaacgacatcacaggatcacttactgttcaggctcaggatccaaatgactcaagtggagctggttcgcgtgtaagcatgtcaggtaatgcagtagttgcatataaaccaggtggagaaatccatgtctataagtccccagaaattggaccagatcacgttcgcattcctggttggactgtaaagaacggaacctcaattcactatgatatggtggaacgcaattctaacggtgatatgtggtatcgaattggtcctggtcagtggctttacgggcctcacttgtctttgacgcaaaacggtgcgtatcaaagctacagtaattccggctatggctacatcaaaaagaatcaaactaagtatcattgggatagcaaacatcacaagatggttgctactactcatacagtgactacaggtggcaattctaagaaccataaatccggtagatactgggcttctaagaaaaagaaggttactgtacacgcccacaccggaagagtagaaattgataagactattgttcaaggcgggaagacttaccaccatactaagtatggttgggtaagttctggatcgattgagtataaagaaaatgggtccatcaagccttcaagtacagatcaaattctaaaagataggctaaaggatcatagcaaagttgaaatttatgcaactccagataaaaacaatgctcttaactggtcaattccttcaggtactcaattggttgctgatggtcatgaagctaaaggtggagatggcaagacctatgttgaagtgacctatgctggtaaaactggatggttacctgaagataatattgattctgataaatctgatttggtttctccagatgcaaacgatgacgatagttcgaatcctaatccaaatgttgatacttcacataatgaagtaactgtaaaagttgggcctttatatgcagacggcttcggcaatgatccaaatattgataaggtcaacactgtggatgtcagctcatacttgaagcacgatgatcaagatttgtccggacagcaaccggatggtacttttgttgctactgcagatgacatcaagcaagtaacagatataggtaaaaactatatcatcgagcacaaatacggtcatatagatgtgcaagatacaatttcttatcaagaaatgtctgctttaaatgcgaataagacccaattgagtctttatgactatgtaactgttaagtatgacaagtatcatattaatcaaaaagaagaagttaatgggtttgtttgggatggattggctcaacattataagcaaattacagtaggtagattgcctgaaagctggcaacacctgttactccaacaagctaaagatcaaacaagtagtgctgtcggtgctttcacacgaagaactcaaggttggcttaaccggtttgaagatatgatgcattcggaaaagtcagatcgtcgtgcaaaagaaaacaagatgatgagcgagctaggtatgatccagcaagatgttacctggaaagatgataaaggaaaagagcataaattaaaggatgttttccttgaaagtcgtaaagaatttgaagaacatttccagcaattagatgatgatgcttcagatattaaatcttggattgatcagccgggcgaaggcattatccaggcaattcctaactggcaagcacctcaacaattgactgctagaagtagtaacggcggaaagatggtgtttgggggtaatggactagagttttatgatgagcgttctcagaaattgctaaccggtatggactcacgcggtaaactttatgctgactcgattgagggcgtaaatgtaaaagcaatgaacatcgatgcaatgattatgcacggtaacttggtcaatgaagatcctaatatgaatatgaaaatttatattggaacacaaaatccaggtactactttaaacccatggagaaacgggcgagttatctgggtgacttcagataactatgcttctatgatgtcatccggacaatttgcaacaactagtggtagtcatatcactcgaattcaccctagtgctatcactgtggatgatgaggacaatcaagttttgacgcaaagaaattttgctgggcacgcttatcgaagaatcaagtcttgggtacgtgcctgggttgccgattggataaccattagaggtactaagcactggatttggaaaggctctgacaacgttgatatgggtaagctgagagatttaccaggacaaggtaggaatgactatagatatattcctggtagtaatgatgactggggcagtgatgaagctggcacattagatggaattgatctaggaagtctagtatttgatagtgaccttcaagaaatgaatcaacagtggcagaattcctttaatgatcttaaaaacggttatacgaatatcactgtgccttcaactcctgatatttcgacaaatccagggcaaattactacagatgtggatagtacttcatctaaagcgggaatgcttaactatactgaagcatacaatcgtggtttaggtcctaagagtggtcattatactgaagccgttggtactatgatgggcggaaatgatggtcatatgtatgtattgaagttatatacgcctacaggcaataaacactggtatagagtccaataaggagaatcaaatgaatgataaagtggcagaaacactagcaattaatactggcaatatgattgcttcacttaatgttcaagtagcaaagttgcaggttgctcttaaagaacaaaaacaagtaaatgattctttgaaagaagaaaatgacaagctaaaaattgaaaacgccgcgctaagaaagaaggtgaaagcaaatgagtctagcgcaaatagtactaacaaccaacaagacaacaagtaatgtcggtgattatatcaggaaaattggacaaggagaacgtggccaaattttgccggtcatcgttgtggatgcaactggaacaccttacgacctatctgataaaaaaatagttttttcagagtcaaaagattctggcaagtatgttgtggacgatgggaaagcatcgacaagcggtaaattcactttgactgatccccaaaatggcaagttctcttatgcattgcaagaccaagtttatccggaatccggtacagcatggtttgatatcgtaagtgcagatggtacagtacttgatacaacggtaagttttagatttgtcgtaataccaagtgctactttacatgttaatgatgataactattcgtccacgcttgatgctttgcaagctcactatcaaggcgtaatcaagaacactgaaactcaaacacaaaacctaatcaatagcctgactgataaaatcaatcaggctatttctaatgggcaaagagacgtagctaatgaactgactgatatgcgaaatcagttgcaagctttgcacaatcaagaaaatggcttgattcagagttggactaacgactttaacgctcgcaaggctgattttgataaattgaaggctgactggcaggcgcaatctaagaccatttcggatagttatgcgtcaaagattgctgaaattaactctcaaactcaatctcagcatgatcaaattcaggctaaagcagatcagcaactccaagccaaccaatctgctagtgatgcagaactggccaaaattaaatctgatgcacaggcacaacatgatcaaattgaaaaagctaaaaatgatgcaattgcggagattaccgctcaaagggatgctacgattaatcaagcaaatgctgactttaaagctaagattgatgctctgcaaacagattacgatgcgtggaagtctaccacactagctgactttactaaacagttagccgacattaagaccaacatcagcaatgatcaatccacgctaaaagactttgatcagcaacttgattacaccaagcaagaactggctgatatggctaagcagctggatagtctggaccttactaagtttgtgactggtgatcagtttaaagatgctatggctaaaaaggctagtggtctaaagattatgggattaggaggcgaatatgtcatggcagtagatcaaagcgatcaaaacatcaatggtttgcctaatggtgttcaaggattggctgacattggagtgctttcaggggctttacaagtactagctgatgcgattttggacaagaatcactataccaagcctgaagtagataagatggtcaatgatgctaaagctgcaatcatgaataccgtcaacaccaaggctaatgcaagtgatttaaacaataaggctgacaagtctcaaattcagtccttaagttcacaattagaatcttataaacaggaaaacgataatcttaaaaatgaaaattcacaattgactaaccgattacaaacactagaaaataaacagtttattgcgcatgttgccagtgaagaccaggtagcaagtcaatcagcgccaattgtcatcgtggatgactagactagaaaggagattttatgagtaaactttttattgataaagtcaaatttaatccatttgattttcatgaattaagtgcagctgatgatatgaataatattttacgatcaggcttttacgttactagaggaactaaccctaaaaattttccaactgctgagataaatgagggacgctgggctacggttctcgtctataaccacgataatggtcaaatcttacaacaatggattattcaaggacgaacatataaccgctggctcactacacctggtaatggcattggtgttcctacaactgattggattaaagttgctacacaaactgacttagaatcactacaatctcagattaatgatctcaagaataaaattgggggggtactcactagcctatatactaagcttcgtggcaccttcactagtttggaggtggcttagatgagtatttacattgataataaaaagctattaagcctacctgatctcgctggtggaggagttaatctctttagaaatacctatgattttgctacttggcaatatactccaggcaaaggtgattttgaaccagcttcaaattataatagtgattccaaccatgaattcattcaaactaaaaaagttgctcatttatggggtaacaattctactgaagcaaagcttttatatacgcagcccttacatttggaaaaaggaacttatactgttagctttcttgcaagagacaatggacctgatccgaaaaattcgtcctttgggcttgaattgtattctagctatacaaatactcacggtggaaatccacatgggatgactaagagtaaattatctaatgtttggtcttcatatagcattacatttgctttgcctgagcagttgactttagcagatattagcttaggtcactggggacctcaagagcttataccaggcggttcaatatatttgacaaatttgaagcttgaaaaaggacctgtagcaactccgtggagtccaaacccattggatatactagatgaaattgaagcactaaaaaggacctgtagcacctccgtggagcccaagcccattggatactgaagacatgctggattctctaaatcgtaggttcaaaattattaaagatgataattttgacttaaatgataagttctcaaaaatttggactaatggtcataagttgaaaaatgcaccagcaaattttgacatctatgcactttatatccaattcaatgtagacgaatacaactggttcgaaattggttggggatgtaaaaaccaaattgcatatcgaactagatcaggaagtccgctcacatggagtgaatggaagataataggatagaaaaaatgaaacagaataattcaagaccgccaccagcggtctttttgatacaaaaaatcactagctacagaaaggaaaaattatgacagaagaaacagcaaacacacctgtacaaggtgcagaatccgaacaacaaaatgtggccagcaatggccaaagcggtaataccgaacaaaagcctaagactttaaatgacgtcttaccaggtgaaggaaccaatttggtttacatttcaggcatgcttcaaggtgtgcaagtagactgtgaagggccgattgaatacacacgcaagctaacacatccacaatggccatttgttcctgctttgccacagtacgacccaagcaagtgcaagactccgaaatttgactggggcaaaggcgaatgggtagataaaagcgaagaagccaaggaaaaagaatttaatgatctgaagcaaacggttaaagatttacaagccgataaccaagatgcaaaaggcttgtcacaaaaaattgaagccattcagcaaggacaagatcaaacaactgttgtactaggtcagttgcttccagcagttcagcaactttcacaatttgcggcaagtatgcaaaagcaagcaaccactaatactgatactaacaaagaaggtgacaaataatgtttaatttcaattttgatttttcaaagtcatttgctgcaatgcggtctttagttaagcagtcatatgactggggacaaccaatcgggaattttgtccaatcaggtgcgattaccaagaccgattacaaagaaatcactggccaagactacgcccaagctactgcatcccctgcagaggagaaacaacctgatactgaaacaccaggaaccgcgggtgatattcatgatcaagcaaacgattcacaacctgttcaagaatagctggtatgtgattcttggaatttctaattgtttagtaagctatgatctactgacaaacgaacacttctttttctggccaccacaatttagaaatttaatgaatgacgatcgtgctgattggatttttctaatcattgggatcgcattctttatttatgcagctattaatcgacatagcaactggataattacgtttttgctagctgtatctgccgccttttataccttgctaggctttttagcatgggaacacatgcaatttgcaggggtgtctagtatgggtgtaactgcttcactatgttttgtgatggttctagtgattttaaatgtagccagaaacagagatacgcacagataggaggtggttagcttgcatgacattggttcacttttgcaagctataatgccttacgctgcggctattttgactgtgcttttaagctataaaagaggtagtaaggaagatgagaacgaccgcttagctaaacgtaataaaacattaaccgagcggattgatcaattaacgagagaaaatgatagattaagaaaggaattggacaaaaaatgacgattaaagattggattgaagtgggaattactgtagcaagctatatcatcgctgtaattgcgggtgcctatgctcgcaacaaggcaaaaattaaccgcacaacccgtgctggtcaagcctatgatgttttaggtaagatcgcaactaatgctgtccatgaagtagagttcttgggtggtactagtaaggaaaagcgtcaaatgggttatgaattgattaatcaggctttacactacatgggtatcaatgatgtgacagctaacatgatctacggcgctcttgaaaaggctgtagccgctatgcatttggcagatgctgaagaaatggaaaaagatcctgctgtagctcaagatgtggatgaaaaagacatcatgcaaccagttgatcaattgccaaagcctgaagaaactgcaccagcagaaaataaggacgtgactgtaaatggcaagtagagattatgttgttgatgtggctaattatcaaccgtccagcatgagcacatataagcacgctggagcacgtcaagtaattgttaagctaactgaagggacaagttattttaacccaaaagcaagcacacaaattaagtcagttcatgctaatcatatgtacctacatggctaccactttgctactttcagtaattcggttagtcgtgctaaagcggaagctagtttctttgtagctcgtgctaagaaacttaacattagcaagaagcgctatttgtggttggactgggaaactggtgacggtaattccgttgttggtgataagtcagctaacacaagagcaattttggcatttatgaaaatatgtcatagtgctggctataaagttggcttatattctagtgtatcaatccttagacaatatgttgatgtagctaaagtaattaaaaattatggtacttgcatctgggtagctgcctatccttgcagtggtgcaaccagcaaaccagatttcaattactttccttctatggatggtgtagctgtatggcaatttactgataattggtgtggcttaggtgtggacggtaacatcaccttaaaagagttgattactgatagtataaaaaaggtacagaaaaaatccatgtccaccaaggattcccacaattctggaacgcaaaaggaacagaagtcagaaaagaaaacaggtttcgtatatgcgccagtaatcagccacaatcctaactggatgattcaactgatggacgaaaacggtcattacactggcaagtacattaagacaaatacacgctggaaatattttaatgtgaagacaattaaaggcatgaaatgttataagctgggcactgacaaacaatgggtacccgccgaatttttaaaaataattgaataaaaggagttgtaaaagctccaaatatcgcaaagaccgccctaggatcattgtcccagagcggtcttttttgcgtgtttttttagaagtatttatttacattacacgcttttgcgtgtattatatagtgaaaggaggttaaaggaatcggagctaggaggtgacaaatatgcggaaagcctaccgcagaaagaaaaagctaaagctgattcttaaaacaactttttggattattgagttacttgcaaatctcgcaacaatccttcaattatttggaatcaagctttagcttttaaacaaaataaataataggaataggggattgaaatcctctatttcatatatcttaatttagaataggagaaaatacaaatgaaaaaaattaattgggacaaatttttaacgaaagcaatttatactagcgcatttacctttttggttttaagaattttattatggttaggagtgagattctaatggcagaattaagtgaagcaagaaaaaaagcaaataaaaggtgggatgataaaaataaggctcgtaagctttacattaataaacgttcaacaacaaagagcttcattttaaattttgctactgaagctgatttagaacaaattgaaaagtatattgaagaaagacgtagtaatttgtagttgaaaacaatactaaaaaatggctaaataaaactaacaaacagtgagcatattaaccattaaattggtgataaatgctttagttaacgcacaataataatataggagaacaaacatgtatttagtatttttacattctagtgatacacatggatttttgttgccaactgattaccaaaataaaaccgactatcatgctccttttagtttgagtagagttagctcagttattaaatctgaaaagaaaaagtatggtgataacaatgttgtagttaccgatgcaggtgattgtttgcaaggctcaccacttgcttcctatgctcattcaactggcgattatagtgatttacgtatttttacgcaagcttataatgcagtggggtatgatgctcgctgtttaggtaaccatgattttaactttggattagattatttaagctactatgttgataacaatgaggcaccaatcattaatgataatgtactggatgcagaaacagaagttccattttttggtagagaatacactattatcaagagaaatggcttaaagattggtttattggggattacaacgcaatatatcccacattgggaacctaaagaaaatgtaaaaggcttaaagtttgcctctgcttacgaaaaaattaagcattatgccaaaatattacgccctcaggttgatattttagctgtgatgtatcatggtggctttgaaagtgatcctgaaactggtaaggcgactgaacctaatcgtggtgaaaatgaaggttatcagattttaaccaaaattccagaagttgatgtcctattgacaggtcaccagcatcggtgcttaaatttggttacacgcgatactgctattgttcaaccaggttatcgcggtgaagctgtagctgaagtggttcttgatattgatgatgatactaagaaaatcaaatcaatgtccactaagttgattgacactaaagattatgatcctgatcctgtaattgttgatattgtatctgacttggataaaagaacacaaaaatggctagatcaaccaattgcacatttagataaacctgctcgaattgaaaatgcaatgaaaggcagaatagaaggcgcgccatttattaatttaatccagcaaatgcaattatggtttactaaagctgatgtttcggcaactgcagtgatgagtgagacagctaagggatttgataagaccattactatgagagatgttttgttaaattatccgtatgctaatcagttgtgtcgtgtgaagctgactggtaaagaattacgtcatattattgagcactctgctggctttttgaagaaagatgaagcaggaaacattggctttattgatcgatggattaagcctaagccaatgttgtatcattttgacgtcttttatccagtcgaatatgaagcggatttatccagaccagtaggtgaacggctgactaaactaactttgcacggtaagccaatcaaagatgatcagatttatcatttagcagttaacaactatcgtgctatgggtgggggattttatcctgaatatagtatggacaaaattgaaaccactttggataaggactatgtacaaatgtttagcgaatatttgactcatggaccagtcgaagtagatacaaaaaagaattataagttttactaaaccaaacgaaaaagacgtgagaataaaaacatctcacgtcttttttgaatagattgaataattattttaacttactgtatttactattatctttgtgtgaacgagcagtaatagtcgcaataattgctgagaaaagaataccaaaaatgatcccaacgattacacaatttcttaaatctgtgccgttgaatgaagcacttcgggttaaaggaccagcaataaagcctacaactaacatgtagattacgctccatacagttgtgatgatataacgacccataatgattccttctttcgtgtatgattttatcaaaaatgaagcgcaaattcaaacctgattggttcaatttggtatacttaatttaatgtttgtaatgacgaaaggtggttaatttatgcaagtagcagcacttcaaaacataagctcctttacgcttttaagtagtccaaccaaggtaagtgatttgataaaagacgctaaagagaagggctatcctgtggttggtttagccgacgtgaacgtgacttatggtttggtcaatttttatgagttggctaaaaaggcgggaattaaaccacttcttgggatgcaactgcgtttaaatggtttggttgatagcacccaaaaatatgatttgctagtttttgccaaaacaaataagggctatcataatttattgcgactttctagcgcggtaaatttgttaacggaaaatgggcaaaacgataaggtcttaacgctgaatgaattaaccaaatatttagatgatttgttgattatcgtaccagctaatctaaaaagtgaattaatggcgctgcatgatacaaatcaggcattaggcagtgattatgttcgccaactaaagaagttaacgtttgatctttatttgggtgtatatgcttcaaaagcaagtatagattacattgattatgtccgtggattagctaagcaatttgaattatctttagttgcagtggaagatagtcaatatttacggccacgtgagcaatttttacaaaaaactttgcgtgcgattgctaagggagataaattgcaagatatattgccactagctaagcaagctggttcgcattatttagattctgcacaaaatgttttagaacgctatcatcaatatgacttggatgatgcaattaataatacttggaaaattgctcagaaatgtaatgctgaagtgatctttcaaaaaccggtcttacctaaatatcatcaagataagtttccgacttcagaagaatatttgcgttatttggctcaaactggtttacaagcgcgctttggtcaaaaaagtattccagccgagtatcagaaaagattaaattatgaattacgagtcatcaatcagatggggttcgatgattattttttgattgtatgggatgtaattaactattgtcaccgagtaaaaattactactggtccaggacgtggttcagcttgtggttcactggtttcatactctttgcgtatcactgaagttgatcccatccaatataatttactgtttgagcgttttttaaatccggctcgtcatgagatgcctgatattgatctggacattcctgatattcaacggaatacagtaattaagtatatgtatcaaaagtatggcatggatcatgctgctcaaattttgacttttggtacaatggctgctaaacaagtattaagagacgttggccgggtttttggcttaacaggaccagaaatcactaagtggactcacgcaatcccgtactctaaagatagaatgggattaaaaaaagcatatcaagagtctagagaactaagattattggttgatgcaacgcctgagaataaattgttatttaagactgctttaggacttgagggattgccaaggcattattctattcatgcggctggattggtgattagtgatgattcgattgctggcatttcgggattgcaggctggtcctttcggcattcctgtaactcagcaaaccaaaaaatatgttgaatcattaggtttgctaaagatcgactttttgggattgcgcaatttgacagttttaggcaatattttagctttagtgcggcagcaaggtgtaaagctagatcctaatacaattccgttaaatgatcccaaaacaatggaactgtttcaacaaggtaaaacagatgcagtcttccaatttgaatctggtgggattcgtggtgttttgcgtaaattgcatcccgacaattttgaggacctagtagcggtgaacgctttataccgtccaggtccaatgcaaaatattgacgcatttgttgcaagaaaaaatggtacggctactgtgcattatcctgatcccagtttaaagcaaattttacaatcaacttatggaattttggtttatcaggaacaagtcatgcaaacagctcaaatcctggcaggattttcattgggtgaagccgatattttacgacgtgcgatgtctaaaaagaatcagaatgtcattgagcaagaacgtggaaaatttattgctggtacggtcaaaaaaggtcatcctaaagaagtaggtgagcgagtttatcattatatagagcaatttgctaactatggttttaaccgttcacacgcggtggcatataccaagattgccttttggctagcttatttgaaggttcattatcctgctgcattttacacagcgatgctcaattcatcaacgtctgctaaagcgcaaagctattcgatgcaagctcaggaagctggagttcgtattttgccgcctgatatcaatcacagccaattagactatactttacaagatggcaagattttagttggtttaaaagcaattaaaggattacgtcttgattttgctaaggaaatagctgccaatactaaaccgtataagtcttttaatgattttttgcgtagaatcgatgctaagttcttacaagtagacgcaattgaagcattgattatggctggagcatttgactcaatcgaagataatcgcaatgagttattgcttaactgcaaagatgtaattgctaatgtgcaattaacgggacaaaatatgtctttatctgagattctgggggatgcaccacttaagcctgctgagccaccgactgctgcccaaaaagcagaaatggaagagaaagctttaggctttactacaacaactactcctctaatagctgtacaaaaatatgcacaaaaatttaacgctagaccattgaatcaatttcagttaaatgatagtggtattagcgtgggtaaattaatgaagttaaagcaaattaggaccaaaaatggaaaaacaatggcttttgctagttttgctgatacatctagcgaacaagaaattattatttttccaccggcttatgaaaaatttggctctattttaaaagaaggagatatttatttactaggagtcaaggttcaaggtgatcgatttgaccaaaataaaaaacagtatttcttaaccaatttgcgaaaagttaattttaaagaataaagttcaaattacaaagctatctttgacgatggatgtaagtgctaacaagaaactgtcaaatcttttgtgtaaatagatctttctcgtaaattgattttttaattatttatttaatcaaagtaggattctaaggtgtcctgaacctgaccaaagcctttatgaattcgattgaaataacggtcattgtagctcattgcctgaatgccaataaaagcatcaagcgactgttcagttggaaactctgccttaggcttagctttgcgcttgatcacattgttaaatgattcaatcatgttagtcgaataaattgaagctctgatctgcttgggatagttataaaagaccagcagatctggttctatgtctttcaagcttctgataacatggctgtaaaccttgccccatttggtatagaagtcatgcaggacagctgtggcttcttctttgtttgtctgttgatgcacctgtttgaattcgttcatgatcttttcacgatcgtcgacgcgtactttagcgcagatattgcgcatgacatgaaccaaacagcgttgaaaatgagctttaggataagtcctggccaaggctgttttcatgccaacaacaccatcagaaagaaaaagctcaacttgctttaagcctcgggatttcatgttttgaagcatatctgtccagacttcaatgttctcgctaggtgcaatgcagtagtcaatgacctccttgtgcccattaggcttgatgccaatggcaatatagactgcttcacgctcaaatgtttctcggcgcaaaggaaggtatgtcgcatccaaatagacgcagaaaaacttgtcgcttagcttgcgtttgtggtaagcctcaacctttggaatcatctgcttggaaatatttgatacctgagctggactgtaatggctgccatacatcttttcaattagatcggctatttccctggtggtcacgcccttggagtaaagcttgataatcatgctttccaagatatccgagtgctgcttgtagccaggcagcgtgtgctgatgaaactgaccgttgcgatcccgaggcacttgcacttcaattgggccaaattgcgtatcaactttgcggaaataagcaccatttctagagttgccagtattccagccatttctggcatagggatcatagcccagaaaggcagtcaattcagcttctagcaatttattaacagcctgttgtagctctttgcgcaataaatcatttattttgtctggattgaatagagcttgagcaaaatctttggtaaaatcattcatgaaggagttcttctttctgtatgtgtttttttgttcaaaccaatcatacgagaaaggaactcctttttctaatgtttaaagaaataaatttaaggaactcctttttctaatgtttaaagaaataaatttaaggaatcattcatccttacacaaactattttacagtctcgctaacaaacttaaatacggaaagaaagcataaattagcccaatttttgtgagcttttttgcctaaaaaatgttaatatttatgtgatgtgagaaattacacaaaataatcatgatgaggtgaattcatgaaacggattggtattttaactagtggcggagacgcccctggtatgaatgcagcaattagagctgtgacgaagactgctatccatcatgggcttgaagtctttggaattcgttatggtttcgctggtttggttgcaggtgactttgttccgcttaccacggaaaatgttgaccacaagattagtgaaggcggtactttcttgtacagtgctcgtttccctgaatttgcacaagaagaagtgcaacaaaagggtgttgagcaattaaagaaacacggtattgatgcggttatcgtaattggcggtgacggttcataccatggtgctttagccttgactcgccacggcgtaaactcagttggtttaccaggaactatcgataatgatattccttatactgactacacgatcggctttgattctgcttgtcgtactgctatggatgctatcgataaaattcgtgatactgcaagcagtcaccaccgcgtattcgttgttaatgtaatgggtcgtgaatgtggtgatatcgctatgcgtgtcggtgtagcaagtggagcagacgcaattgtaattcctgaacgttcatacgatgttaaggaaattgcagaaactcttactcgtggttttgcagatggcaaagatcatggtatcattgttttagcagaaggcgttatggctgctgataagtttaaggacgaactccttaaatatggtgactttgatgctcgtgctaatgtccttgcgcatatgcaacgtggtggctcacctactgttacagatagagttaatgctactaagatgggtaattatgctgttaagttacttctcgatgggaagggcggtttagctgtcggcatggagaatggtgaacttaatacccacgacattcttgatttgtttgacggtaaacaccaaggtgattatgcgttattggatgtaaatgaagaaatgactaaatattaatttagttgatttttggagaggatttttttaataatgaagaaaactaagattgttagtactttagggccagcttcaaacgatattgaaactattactgctttagctaaggctggtgcaaacgtattccgtttcaacttctcacacggtgaccacccagaacaccttgctcgtatgaagatggttcgtcaagtggaaaaggatactggtttacttcttggtatcgaccttgacactaagggtgctgaaatcagaaccactgaacaagaaggtggcaagttcactattaatactggtgacatgatccgtgtatcaatggatgccactaagaagggtaacaaggacatgatccacgttacctacgacggtttatacgatgatacccacgttggtggtcacgtattaatcgatgatggtttggttgaccttttgatcaaggaaaaggacgactcaaagagagaacttgtttgtgaagctcaaaacactggtgtaatcggttcaaagaagggtgttaacgctcctggtgttgaaattcgccttccaggtattactgaaaaggatactgatgacattaagtttggtttgaactatggtattaacttcattactgcttcatttgcacgtaaggctcaagatatcttagacatccgtaagctttgtgaagaagcaggtgcagactacgttaagatcttcccaaagattgaatctcaagaaggtatcgacaacgcagacgaaattttgcaagtttcagatggtttaatggttgctcgtggtgacatgggtgttgaaattccatttatggaagttccatttgtacaaaagagcctaatccgcaaggctaacgcacttggtaagccagttattactgctactcaaatgcttgactcaatgcaagaaaacccacgtccaactcgtgccgaagtttcagacgttgctaacgctgttcttgatggtactgacgcaactatgctttcaggtgaatcagcaaatggtctttacccagttaaggctgttaaggctatggctgaaattgacgaacgtactgaaaagcaaatgcttaagcgtaatactttagctcttcaaagattcgaagcttacaagggttcaaacgtaactgaagctatcggtgaatcagttgtacgtactgctcaagaattaggtgttaagactatcattactgcaactaactcaggttacactgcacgtatgatttctaagtaccgtccaaatgctgacattattgctatgacctttgacgaaaaggttcaacactcattgggtatcgtttggggtgtacaaccagtattgactgaaaagcctaagtcaactgatgacatgtttgaaatggctgctaaggtagctaaggaaaagggttacgtaaaggatggcgaccttgtaattatcgttgcaggtactccacttggtgactcaggtacaactaacttaatgaagttacaaatcatcggtaacaagttagttcaaggcttaggtgttggtaacggttcagttatcggcaaggctgttgtagctaactcagctgaagaagcaaatagcaaggttaaggaaggcgacatcttagttgctaagactactgacccagactacaacccagctatcaagaaagcttcaggcttagttgtagaagcttcaggtttaacttcacatgccgcagttatcggtttatcattaggtatcccagttgttgttggtgctactgacgctactgacaagatttctgatggttcaactattactgttgacgctcgtcgtggtgctatctaccaaggcaaaatctcaaacctttaattttaagaatataatttagatagattagctaatcaaaaaatagccagcttaagtgctggctattttattttgcataaaaatctcttatacttatatgtaagaatatgtaaagtaggagatttttaaatgcttggaacagttcgtaaaggaaaaattactgacgaaaacgataaagcttattatgttcaaattgatggactgacttatgaattgaagaagatcgagattacgcaagatgatattcctaaaattggagatgaagtcgaaggttttatttatgataataaaagtcatgatcgagaaatgacacaatttttgccattcgcgcaacccgatcaatatggttggggaaaagtaaccgaggtacgtccaggcttaggcgtctttgttgatgtaggtctacctgataaagacgttgttttatcaatggatgatcttcctagagaaaaagaaagatggcctcgacgtgatgatcgacttttagtaagattagaaactgacgaaaaagatcgtatttgggctaagctagcagatgaaaatatttttgaccaattagctgctaactttccacgtggaatgaataatgaaaatgtctttgcaacggtttatgttacacgagagataggagcatttgttttaactagtgattattatcttggctttgtacatgaatcgcagatgccacgtcctatgaaactaggtgagcaattcaagggtagagtagtcggtgtcagtcaatatggacgtttgaatttgagtgctttgcctcgtgcttttgaagaaattgatgatgatgcgcaaatgattttgatgagtttgcggagaagagaaaccaagactctacctttctatgacaaatcaagtgcacaagaaattaaatcatactttggtatttcaaaatcagcttttaaacgtgcggtcggtcatttgctcaaggctggattaattgaagaagataaaacagcaggtacgattactttaattaaggatccagaagagaacgataatggagaagattaatttaaaagatcaaattgatgattatttacgctatagtcaagttgaacgaggattaagtgataatacaattaatgcttatcgtcaagatttagaagaatttcaaacttttgtagaaaatgaaggtatggcttcatggccaactgaagcaagcgatgtggatgcgtttttagctcggcagcgtgatttgaacaaagcaaccagctcaattagtcgacttatttctagcatgcgtaaattttatcaatggttagctcggcaaaatattcaaaagttaaatccaatgttggaaatcgatttgcctaaaaaagaacgtcgtttgccgacagctctctctcaagctgaaatgaataggctacttgagcagccaaatactaaacgaaagttaggtatacgtgatcgtgctatcttagagacattatatgccacgggaatgagagtaagcgaattaattaatttggagttgcaggatttacatgacgatttaggcttagttcgggttcttggtaaaggcgaaaaagaacgattgattccaattagtcctgttgctcttgattggataaaaaaatatgaaaatgaagttcgtgatccgctaattttacaagtagggaaaagcgatgaacatatttttttaaataatcgaggaaaaaagattacacgacaggctatttggcagatgatcaaaaagtattgtcaaatggcggcaattactaaagatgtcacgccacacactttacgtcatacgtttgcaacacatttgctagaaaacggcgcagatttgcgagtagtgcaagaaatattaggacattctgatattagcacgacacagatctataccaatttatcacaaaagcaaattttaaatgtttatcagaagacacatcctcgtctttaggtgattaaatgctaatacaatataaaaaagattatgagaagatagcaatgggattactatcctatttacctgattttaaaaatatcgaaaacttaaaagaagaaatcacgcttaatcaggatgaaaatgactttattttgtatctttatcgtaatagtcaaaataatatggtgggcgtaataggaacccaagtatctaatcagtttgtaattattagatatttgtctttagctcctggttttcgtgagattagttatgaacggaaaattgttgatgaactaaagcacgaatatccagataaacgaataactgctgtaccagaatatacaaatttattaaaaacggtagaagaagataatggacaaaagtaacttaactttagaattaccgaattttgaaggaccacttgatttattactgcatttgatccaatcgcaaaaaattgatatttatgatatcccaattgcccaaataactagtcaatatttagaatacttgcgccaaatgcaaagcttaaatttacaaattgcaggcgagtattttgtcatgtcatcaactttattgcgaattaaatcacagtatttgttgcctcaaaacgattttgtagatgatattcaacctgatgaagatccaagagacgaattagtgcaacaattggtacaatattctgtgtttaagaaaatatctgcttattttaaagaacgtaatgaagaagtaccgattacagttgctaaagaagctagtgtatcaaccactgctaaagttcaaccgctgcctaagggtcagataactgcacaagaattagcgacgacttttacgatggtcttacatcgtttgaagttgcagcaaccagataccgcttcaattagagtagcagaaacgccgatcaatgagatgatggattttttgcatggacaattgaaacgaaaaaggcaagttagtttctttgcttgcgcggacaaaatgcagaatatctcagatgttattggcttatttttagcgacactagaattgtgtaaaaaacaattaattcagattacacaagcacgtgaattcggtgatttaaatttagaaagaattgatacgaatggcaagtaaactagcaaatttagaagctcttttgtatgtcgcaggtgacaatgggcttgaggagcaaaatctaattgaactacttgaagttgatggtgaagagctaggtcagttagtcactcgtttgcagcaaaaaatgaaggctgatccagactcgggaatgcaaataattcatattgcaaatacttataagatgacaactagtcaacagacagctaagataattgaaaagtattttcaaaaagatttaactaagaatttgagtcaatcagcacttgaaattctctcaattattgcttatcgacaaccaattactagaatagaaattgatgatattcgtggagtaaattcatcaggagctttacagacattgatttggcgaggattaattaaacaagacggcaaaaaagatgctccaggtcatcctaagttgtatgttacaactgattattttttacaatattttaattatcaaagtttggctgatttaccgttaatcgaagactttgaggatacaactgatggtgaggagattgacttattcgattcaaaaggtagcgcagacaaacatttagaaaaagagggatagaaaatggcagaacgattacaaaaagtaattgcggaagcaggaatcgcttcaagaagaaaagctgaaaaaatgattgtagccggtcgagttaaagtagatgggcatgttgttactaagctaggtactaaagtcgatacttttagtaatattacagtcgatgatgagccaattgagcgggaaagcctacacacgtatttgttttataagcctcgtggcgttgtttcgactgcagaagacgatcgtggtagaaaaactgtagttgattatttcgaagatttaccatatcgtttgtatccagtaggaagattagattatgatacgtcaggtttattgctaatgactaacgatggcaaattagcaaatttattgatgcaccctaaaaatgaagtggctaaggtctatgtagccaagattaaagggattttaactcctgatgaaattaaaaccttgactcaaggagtaaagttggatcattttaaggctgcgcctgccaaggtcaaagtattgaaaactgatcataagaaagacacacaaattgtccaaattacaattcatgagggacattatcatcaagttaagcgaatgtttaaagcagtaggtcacttagttgataagcttgctcgtgaaaaatatgcctttttaactctggattcgcttacatcagggcaatatcgggaattatcgaagcatgaagttgacaaattaatgcaattgaactaaattataactgtaattaaatattcaaggttattgtcttcagggcagggtgaaagtcccgaccggcggtgaaagtccgcgacccacgtcagtggttgaatcgttagataccgatagttaaagtctagatggaagaagacaggctaaaaaaacttactacactttttaaggtctgttgctgaagcaatagaccttttgttttgggaaaggaaagtaagttatggatcaagctaaatccaagaatagtagtttaactaatgtgattgcatatgctttaattggctgtattgcttttgtagttatgaaatttgaatttccaatcatgcctggagttgccttcttaaagtttgatttttcagatgtcattattacaattggaatgtttatttttggcattgtaccgggagttattattgctttaattcgaatgttacttagtttaatttttagtggttttgcattaccaagccttgttggaaatctagcagcattcttagcttcaatgtcatttgcagttccattttatttattaagtaaaaatgtgagtgcggataaccgcaagacaatgatgggcagagttaaaccaatttgtggtttggtaattgggattatcgcaatggcagcagtgatgtcattggctaatgccttcgttttgactcctatttacgcagtaacagcggtaccaaacttgcctgctattaatagctatagtgccttgttaagctttactgagaaagtttacttgggtcagttattgcatttaccatcaatgtcaacctacatttttagtattatcatgccctttaacttgttaaaaggattaattaacgctgtggctgtttacttattgtttgaagctaccttgaaaacaattaagccattcgttcgtaagagatttaatttgaattaagttatcatcccatcaattttttaagttgatgggatttttcatattcaaagcatcctaaaatatgctaaaattaatccgttaagtgaatggaggaatttttgatggataaaaagtcaaccgggccatatcagcactatgaacgacctactgaaaagcgaagctcacaagatagtcagcctagtggatcagcacgttggatagcagttattataattttagcggttattttaattgcacttatcccagttgttcatcgtttggcttcaagccattcagaaaaagctgaagaagttcaaacagttaagaaggtttcttctaaatcatccaagtctgttaagactaagaaaacctcatcatcttcttttagcaagaaaaagtctgaaaaggctagttcaagctcatctagtagttctgctactcctaagacttatttagtccaaagtggagatactttaaatgaaattgcagaaaagaatggcttgactgttgatgaattagccagattaaataatcttaaagactcttcaaatattgaagcaggtcagacacttaagttgaaataatctttcagaaaggataaaaggggtcgatgataagatctcttttttattagaatgcaagtagcagtagatggtcctgcatcagcaggtaaaagtacagttgctaaaatcattgcaagtaaattatcctttgtctatatagacacaggggcaatgtatcgtgcatgtacagtgattgctcgtaatcataacttagattatggtgatgaagcgggtatcttgaatgccattgatgaagatggaattgaattgaaatctgaaaatggtgagcaaaaagtatatgtagctggaaaggacgtttctaaagaaattagaacgcctgaaatttcagctaatgtttcggaagtatccgctttgccgaaagtacgagaaaaaatggtaagtctgcaacgtgaaatggcaggcaagacaaatgtcattatggatggtcgcgatattggtacgactgttttacctaactctgaagttaagatctttttagttgcttcagcaagatcacgtgctgaacgtcgtttattagattttaaagagcgtggtattaaatctgatcaaacagttgatgaaattgaaaaagatattgcagcaagagattataaagattctcaccgcaaaatttcaccgctaaaaaaggcagatgatgcaattgaaattgacaccacaaacatgtcgattgacgaagttgtagaggcaattttagctcaaatcgaaaaaaaacaaaaaaattagaaaaaatagcacaaaatagtagaaaaatatctcggtttcctataaaatgggacatgatattgggaggtacatatgtcagaaaacagtaatcaatttttagacgcattaaagcaaatgcaaggagttgaggtcggagatattgtcgatgtcgaagtattagacattgaagacggccaaatcgatgttggtgttgaaaacgctggtgttgaaggtgtcattactcgtcgtgaatacacttcagaccgtaacgcagacttacgtgatttagttaagcctggtgacaagtttaaggccttagtattaagaagagccggtggcgacaaggaaaatggtgaattcttcttctcagttacccgcttaaaggaaagagaagcctacgacaagttacaaaaagacttcgaagacggaaatgctgtcgaaggtactgtaacttcatcagttcgtggtggtttaattgttgatgttggtacacgtggtttcttaccagcttcattaatttcaaaccgttacgtttcagatcttaagccttacattggtaagactatgaaacttaagattaccgaaattgatcctaacaagaaccgcttaatcctttcacacaaggatttagttgaagaagaacgtgaagaagcatttgacaaggttgcatcacaattagttgttggtgacgttgttgaaggtaaggtttcacgtttgactaacttcggtgcattcatcgatgttggtggtgttgacggtttagttcatatttcagaaatttcttacaagcacgttgataagccaagcgatgttttaaaggttggtcaagatgttaaggttaaggtcattggtatcgacaatgacagacatcgtatttccctgtctattaagcaaactgaaccttctccatttgaacaagctacagctgacttaaacgaaggcgatatttttgaaggtgaagtaaagtcattaactaactttggtgctttcgttgaagttgctgatggtattcaaggtttggtacacgtttcagaaatctcaaacaagcatgttgacaagccaagcgatgttttaaaggttggtcaaagtgttaaggttaaggttttgaacattgacccaagtgatagaagaatctcactttcaatcaaggctgctgactcaaatgcttcttcagaaaatcataattctcgtccacgtcgttcacgtaacgaaaattcagtaaacaagaagtacatgagtgataacgacaacggctttgcattaggtgacatcattggtgaccaattaaaggaccgtaagtagtcattttataaaaaagccgacttgagtcggcttttttatttatgtttagattagtaaaggagggcgagaaatggttttaccagttgttgcaattgttggtcaacccaatgttggtaaatcaacacttttcaatagaataattaatcaacgtttagctattgttgaggacaaacccggtgttacccgagatcgtaattatgctcaagccgaatggatggggcataagtttgatttgatcgatactggtggtattacctgggaaggtggcaagatcgaggaagaaatcagagctcaggcagaaattgcaattgaagaagcagatgttatcgtgatgttaaccaatgtggtaaatcacgtgacagatttagacgaaagaatagctcatcttctttaccgtactaaaaagccagttattttagctgtaaataaagctgataatcctgaacagcgaagcgatatttatgatttctatagtttaggattgggggatccgattcctgtttcaagtagtcatggtactggtattggtgatttgcttgatcagattgttaatgattttcctgacgataaagatactgaagctgatgatgttatttcttttagcgtgattggtcgaccaaatgtaggtaagtcttcaattgttaacaaattacttggtgaagatcgggtaattgttgctaatgaagaaggaacaactcgtgatgctgtcgatacgccgtttactcatgatggtgtaaaatttaaggtcgttgatactgccggaatcagaagacgaggcaaagtgtatgagaagacagaaaagtactctgtaatgcgcgctatgagtgctattgagcgttcagacgtggttttacttgtcctcgatgcaagtacaggcattagagaacaagacaagcatgtggctggatatgctcacgaggcgggtcgtggaatcatcattgtcgttaacaaatgggatttgccgaaaaagaatagtacaagcgctaaagaatttgaacgtgaaattagagatgaatttcaatatttggactatgctcctattctttttgtttctgccaagacaggtcaaagattagatcaaattcctaatatggttaaagaagtctatgataatcaaaatcaaagaattcaatctagtgtcttaaatgatttgttgcttgaagcaagtaagttagttccaactccaatggtgaagggtaagagattgcgtgtttattacatgacccaagtaagtacgaatccaccgacttttgttgtatttgtgaatgatccagaattgatgcacttctcatatgaacgatttttgattaatcaattacgacaaaactttgattttacgggtacaccaatcaagattttaccacgtaaacgtaaataaaagataagcaaaatatcataaaaaaccttgttgttataaggtttttgtgatatttttgtttttagggaacatgattagttgtgatcatttttccttgtttagcttaaacaaagaaaaattttttgaacattaggttcaaattcaggaggtgaattattcatggcaaataaggctgaattagtttcagaagttgcttcaaaaactaagttaactaagaagcaagttgcaaatactgttgatgctatccttgattcaattcaagaaaaccttgctaagggtgaaaaggtacaattaatcggttttggtacttttgaagtacgtcaccgtgctgctcgtaagggccgtaacccacaaactggtgatgaaatcgaaatcccagctagtgaagtacctgcatttaagccaggtaaagctcttaaggatgccgttaagtaatagcttaactaatgtgataggacgttggactttgttccggcgtctttttttagtacaatggtaacttgattggaggtattatgagttattctgaacaattactagatgcaattcaaaatcatgatttttcacaaaacaaacaccttttaaaagaagctttagataatgatgctcccgaggtcttgtcatctttagcagaaaacctaactggcttaggttttacagatttagcaaaagaaatatatcgagctttaatagctaaatttcctaaagaagatttatttaaagtttacttggcagagattatgttaaatgatggcgatgatgacgatggtctgtcgcttttatataatgtccctgagagctcttcagcttatttggatagtctattagtacaagctgattattaccaaactaacggcttaatagaaacagctaaggacaaattaatacgagcactacaattagctccagaagaagatgctattaaatttggtttagcagagattgaatatttaagtggtaattatgaacaagcacttgagttatatcaagatttaatcaaacgtcaaagtacttttagtgaagtaaatctgtaccaaagattatttgcgacttttgccaaattaggtaattatgaagaagctgccaaagttattcgtgaacatgcaaatagtattttagatattgattctaagtatgaagcaggattagttctcttatctgtaggtgatgataagcaggcaattaagttcttagatgaagtgattgagcaaagtcctgactatgtaaatgcgtatccattattagcacaagcttatgatcatcagcatgacaatgaacaagtattgaggactgctcaagcaggattagcgtacaatgaactggatgaaacactttattcaatgggagcacgtgcagcagctaatttgaatgaattggatacagctcgtgacttacttgaaaaggggttaaaagtagcgccagacaatagtgatttacgtatgcagctatctaacctatatgttcatgaacaccaggctaaggagaatattgccttatttagtaacttagatgaggaaagcgtggagccacaggcacattggaatatggcattatcatatgaggatttggatgatattcagaaagcacagagcgaatttttactagcttatccggatttcaaggataatccagactttttgcgccaaatgataatctttttcaatgtacaaaataatgatgaaataacaaaacaactgctagaaagatatcttaagttagctccagaagatgatgaaatgcaggatctttataataatctgtaaaaaaataccacgaagtttttgcttcgtggttttattatttctaaaaaataggtgccaacagacgtgaaaagtattgtttaaacttaagccatttagattgctgattaaagtattcattagttagaagactgcaactagctaggtccttttcaaaaatttgtttaagttcttgagttaattgaatattgtaattaaaagcgttaacctcgaagtttaaggtataacttctgaagtcttgattggctgaaccaacagatgagatattggagccagaaaccattgttttggcatggatgaagccatcattatatttgtaaattttaacgccatgagcaactaaatattttgcataatattcggtagctcggtaaacaaagggatgatctggcatgcaagggatcatgatgcgtacatcaacaccgctattagcagcaataattaatgcttctaaaatggattcttcaggaattaaatagggtgtttgaatatagatatagtttttagccccagcaatgatgccctcatatcctcggcgaatgccataatgttggttatcgggacctgaagaaacgatttgcattgctacgttatcatcgttgtcaagatctttacgttcgacagtaaaagcatgtaattcgcttagatcaaatttaggtaatgcagttcgtctgatagaagtattccaatccatggcaaagcgtgtctccattaggataggtgattgacccacaacacgtaaatgtgtatcgcgccaatgaccaaattttttagattgattaacgtactgatcaccgatgttaaagccaccaatatagccaatatgatggtcgattacgattaatttgcggtgtaaatgataatttagtcgtggtgtagtaaaccaatgctttttagaagtagaaatgaaaggctgtgcttcgccaccaagctctcttaaatgattaaaaaaagcaggtttagtaccacgtgagccagagacatcataaataactctgacttttactcctttagcagaagcctcttctaaggcccgtaagacacgctttcctagattatcattataaaaagtgtagaactctaaactaatcgatgttttagcttgcttaagatcagcaattatttggtcaaacaactcgggtccactggtgaaaaccttaactttattggcaaaagttaaaatagcatcatcgttgtttaaattcagctctgataacatgcgggcacgtggtttgcgctttttttcgggtaaaagatcatgttctgccaacatagctttttgtttttttagataacgattacgcgtctctttttgagcactttgaatagcaaaaatttcgtcactaagtgtataattttttacggtaagttgaataaataattaaaaaagcccaagtcctttgaatttggacttgagctcaaacaaaaagaccagtagtctgatgttaagaacaaaaaacacattagaagctggtcttttatgaattcaattgtaactgaaatcgcaaatattataaagtctgaagataattatattaagcgtgaaagaaaaataatctgtttcttcttaaacctgattaaggaaatcatggccttggctttagctaaagttgatgatgaaatgattaccaaggttaaagcacagggctatcagattgataagaagaatgagcgctcaatcaatatggcttttggcgaagttaggtatgtcagaagaagatatgtctgcccaggcaaacaagcaaggtatcccttggatgaattaatgggctttgacaaatacaagcgctacagtattttagcagtcaaaaacatcttagaagtaagcagcgttgccacttatcgcaatactgctctagcagtcaattgcctgtctggctttaatattagccatatgcaggtgggcaatttggtaaaaatggccgggaaaaatattaaagcgggccaagaagcagattcaagatatgatgccgcaggcgagactgtaaaatagtttgtgtaaggatgaatgattccttaaatttatttctttaaacattagaaaaaggagttcctttctcgtatgattggtttgaacaaaaaaacacatacagaaagaagaactccttcatgaatgattttaccaaagattttgctcaagctctattcaatccagacaaaataaatgatttattgcgcaaagagctacaacaggctgttaataacttgttagaagctgaattgactgcctttctgggctatgatccctatgccagaaatggctggaatactggcaactctagaaatggtgcttatttccgcaaagttgatacgcaatttggcccaattgaagtgcaagtgcctcgggatcgcaacggtcaatttcatcagcacacgctgcctggctacaagcagcactcggatatcttggaaagcatgattatcaagctttactccaagggcgtgaccaccagggaaatagccgatctaattgaaaagatgtatggcagccattacagtccagctcaggtatcaaatatttccaagcagatgattccaaaggttgaggcttaccacaaacgcaagctaagcgacaagtttttctgcgtctatttggatgcgacataccttcctttgcgccgagaaacatttgagcgtgaagcagtctatattgccattggcatcaagcctaatgggcacaaggaggtcattgactactgcattgcacctagcgagaacattgaagtctggacagatatgcttcaaaacatgaaatcccgaggcttaaagcaagttgagctttttctttctgatggtgttgttggcatgaaaacagccttggccaggacttatcctaaagctcattttcaacgctgtttggttcatgtcatgcgcaatatctgcgctaaagtacgcgtcgacgatcgtgaaaagatcatgaacgaattcaaacaggtgcatcaacagacaaacaaagaagaagccacagctgtcctgcatgacttctataccaaatggggcaaggtttacagccatgttatcagaagcttgaaagacatagaaccagatctgctggtcttttataactatcccaagcagatcagagcttcaatttattcgactaacatgattgaatcatttaacaatgtgatcaagcgcaaagctaagcctaaggcagagtttccaactgaacagtcgcttgatgcttttattggcattcaggcaatgagctacaatgaccgttatttcaatcgaattcataaaggctttggtcaggttcaggacaccttagaatcctactttgattaaataaataattaaaaaatcaatttacgagaaagaactatttacacaaaagatttgacagtttctagtcatcgtccttataacttgaaaattatttattacgcatttttgacaaatacttttgatgcttttcttcatctttttcaatgaagaagtaagctactgcggctaatacccctacgactattccgaccaaaatagttttccaagtgaaattggttaccatgtagcatgaaataattaatgccaaagctggaataacatagccgaatgggagcttaaaaccgttatttggaaattcattagtatgcttgaatttgattactgctaagatagatggtacatattgaataaatgaagccaatacaatgcaagataccaagaagaggtatgattgtgtgattaaaatcatagtgatgattgcactgagtaaaatagctacccaagcagcatcatgcttgttcttttttccaatccatttaggtaacattgcgtgctcattagcaagagaagcaatcaacgatggagtattgaaagatcctgcaaaagcaacgccgataacactaatcagcatccctgcaatcactagaacgtagccccaatcaccaacggccttttgaaaggctacagcaataggcgtactgtaattaaccatcttggatcctaaaatcccgatagctactaacatcattaatgcatataaaatagtcacagtgatcatcactgagatcaatactttgggaatatttttctctggattattcatctgttttggggcaatcggaataaaggagaatccagtaaacatgtaaaatactacactaaatgcagcaccaaaatgtttgaagtaaggaccaacacctagggttgctgctttaggaatcacaggtgtaaagttcattttatgaataaaaaaggcaccaatgatgataaaaatcagaatagtaatcattttggcagcagaggataagttatcgactaattttacaattgtccgaccaaataagttaataatcgtaaacagcacaattagcacaattattccaatagctatcccgtagtgaacagcgtgattactaaaaacaggggacaaagtctttaaaatagttaacaaagctactatttctgccgcatatgtacagcatcctaaaaaccaagtatatattccaagttcgtagccagtaaatcgcccaaaggcgtgatatgaataaagccaagctgcgcctgatccagtaaaacgacttgacaagtcagcataacaaagagtaaccatacttactgtaagagcagcacaaattgttatgaaaacactcatcaagttcatatctttatagattgtttgaggtattaaaaaggcaccggacccaattaccccattaattcccaagaagtaaatagacatgaacgaaagcttcttgggagtaactgttttttggcattgttttcatcctcttgattgcttgatattgacaaacgcttacaagctaagattagttcttgccatgaaagattgcaaagaataagtgttatccatcccataaataaaaatagagaaaagtgtataacttctgcattttttgttaaaatataggtaagaagattaagtaatgattaggggatgagatcatgatgaacaaaaaaattatgtatatggcaggagtagtcttagcctccttaagtttaggtgcgatgactgctcagacagttaacgcagctacaactaatccaattcgtcagggtaaaaagttaaacttgactagaaaagcaacgatttttaaccgtaaaggagaaaaagttggacatttaaaaaagggccgtgtttacaagatcctaggcattaaatcaattaatggcaataattttgtgaagattggtaagaataaattcgttaaggaaggggcatttttaccatacattaaggacacagccgagacaattaaccgcattaagcatccatcatatgtttatgataaaaatggtcagccaattccaggtaagtttgttaaacaaggctctaaagttaaaaatcttggccataaagaaattgatgaacggccattcattcaaattggagaaaacgaatacgttaaagctaataacgtattgactgtaattattaattattagtaaaagaaaagctatatcatgaaatgcatcatggtatagctttttacttgtggatgaaaaagcgatgtggttttttataagtaaatccttctcccattgcctcatttacctcaattattgaaacaaaagcatgtggatcttcttgcttgattaaagctttgattgatggaatttcccgcggtgcgactacaacataaattacacgtttttcattttgttgatagccacctaaagcttttagatatgtgaaaccacgatttagttttaaatcaatcatcttgccaatttgttcatatttgtcagagataattaataaaccacgggctgtgtatgcaccttgctgaacggtatccattactcgggataagacaaaagaagctaataatgtgtatagcatatgcttgatgtctaggtaagatagggatgcgaagagtactattgcatcacaagctaaaagcattttgccagacgaaataccaaattttatctgacagattcgggcaataatatcagttccaccggaagtaccattatatctaaatactaaccctaatccgattccagacaataacccagcagaaattgctgaaaggaagaggtcgtgttctaaatctaattgttttataataggtactgaatgccaaaaccataagaaaaaggaaagactgagcgttccccagattgtataggctaaaagacgtttgcccataaagcgatagcctaacaaaattagtggaatattcaatacaagggtcgatagtcccatgttgatgccccaaaaatgccgcagaagaagtgaaataccacttagtccgccgtcggctagtttattggggacagaaatcatgtctagacttaaagcgtaaatagcacagcccagcgcgatcatgaggatatcaattaagatacttttgtcaatcttacgcataatgattacctcctttatgtctttcctcaattttaacaaagtgtatagcaaaagtaataataaagacaataagaattgagattttaatatgataaagatagataatttaccagaaatttttaccaaggcaatgcccgtgttacagatattagaaaatgcaggctttgaagcgtactttgtgggtggttctgtccgcgatgttttgttacatcgtcatgttcatgatgtagacattactactagtgcttatccagaagaggtaaaagagttatttgataagtcaattgatacaggaattaaacatggaacggtgactgtcctttatggtggtgaaagttatgagattaccacttttagaacagaatcgggttatcaagattttcgtcgtccagatcatgtaacatttgttcaaaacttagatgaagatttaaagcgtagagactttacgattaacgctctggcaatggatacacgagggcaaattgttgacttatttaacggactagatgatctcaaaaaccatgtcattcgtgctgtaggtgatccagaaaaaagatttcacgaggatgctttgcgaatgatgcgggccgtacgttttatgagtcaacttgaatttaagttagaaagcaagacccaacaggcaattaaggataatcataaattacttaaaaaaatttcagttgaacgaattcgagaagaatttgtaaaattaggtttaggaccacatgctcggcaagcttttcaggtttttcttgatacaaatttgagtgaagatgtacctgattttggcgaaaaaaaagatcaactagctattttcccacagttaaaattcagtccaacgatggaaaatagtttgtggtcactgataattttgctattgaaattaccgaatgaacaaattcatcgttttatgcgtgactggaaaaactctaatgctatgactgagcaagtcgaaagaattattaatctatttgatttactttctagtcatgctcctagtgattatgaattattcttagcaggggaagagacattaattaatacgattgacgttgctcatattgttggtcaaccaatttcttcagaagctttagttgatcgttatatggctttacctattaaaaaagcgtcggaactagccgttgatgggagatttttaatagatcgcgggatgcgaccaggtgcaaaattggggcagactttgaataaaattcgagagttagttgtttcaggtgaagttgagaataatcaagaagcgattgaaagctatttgactacaattgaatagaaagaaaaatgtagcagaattcaactgctacattttttaaacataaagtaaaacggaaaagtacattaagattgaaccgagcataacaaataaatgccagatagtatggataaagggaacattgcgcatactgaacagaatcgcgccgattgtgtaagcaatgccaccactaactaatagccagaatccagttggacttaagcgaacatataaataagatcctgacaagataactaaccatcccattgcaacatagaggattgtatcaagtatgacgtgtttaccacgattgaagatgtagtaaatgatgccaaagatggttaggccccagatcaagccaaataaagtccaaccccaggctccaccaattgcaacaagtgaatatggagtataagatcctgcaatcaaaagaaagattgaggaatggtcaaaaatttgaaaaatatttttggcccgtgtaaaaactaaactgtgatatagtgtggaaaataaataaagcagtaccaggcaagagccataaattgtgaaagtaacaactcgcatcgggctgcctgtatgagctgcctttacaattaaaattactaagccggtaactgctagtccgaaaccaatcccatgagttatggcactaaaaatattatctagaaggtagtacctttctgatcgttgttctggttgctgccaaagtttgctaattttcatgaagtgtaatcaatccttttttcttctaatagttttttgatacaatacagtatatatgttgcttacattttatcataaatcgggtaaacaaattagaattgaaggcgaatacgttgtcgaagataaaagttatgacggactcttccgtccaattaacaccagaagaagttgaaaaatatgacattacagtagtcccattgacgattaccatcgacggtaagtcatatgtggatgggattgatatcactagaagtgattttgtcaagaagatgaatgaagcggagagcttacctaagactagtcagccaccaattggccgttttgttgatgtgattaaaaaattaaccgcagatggcagtcaagtgattggtattttcttagctaaatcattaagtggtacgatagatgccgctcgtcaagctgcagaaattgcaggtcaaagcgataatgttacaattattgactctgaactaaccgacagggcagaaggcttccaagttttggctgctgctaaggatgctcaggctggtaaaagcatggctgagattattgatcatgttaaaaagattcgtagtactcaaaaactggaaatgatggtagttaatttacaaaacttaatcaagggtggccgtttaggtgcactttctggtcgaattgctactatgcttaatattagaatcgctcttcagatgccacaaggtaagttaatcgtagccaaaaaaggacgaggtaagaaatttacacgtgcttttgatgaacgagtgttaaaagaaatcgcagataataaagagcatattaaagaagtaggcatttcgtacgttgatacacctgaattaatggaagaattagctgaaaaaattcgtgcaatcaatcctgcgattaatgttttagtggcagagacaagtccaattatcgcaacacatgctggcaatggtgcttatgcgatcttatattatgtggagtaattatggcttaccgagaaagtttttatcgatatttaatgacgcaaagggatgcagattcagctgatgacgtagctcaatttgcgaataatgcacagcatgacctgacttttcctaagcaagaacaagattatgagaaattgtcagattatttggaattgaatgctagttatttaccaagtatgtcaatttttgatcgtgcttatcgaatgtatgaagacaaaatgatgtattaagcccaagcctgatagatgcctgggcttttttattaagtgggtagaaaaatgcaggtagtaatttttattggttttattgtctttgcggtagcatttgcgacgattattcaacaacgctttttgaagagaatatcagttaattacattgcaatggcgattggagcggctattgcactagtaccacaaactaattcattaattgaggactttagctcggaattatttatgggcttgattgtagcgccattactattttttgagggacaacgtactaggttgtataatgttttacgttcgtggggcgcaatagttgggttaacggttattatgattatcttggcaactataactgcgggattcgggatctattttagtatgggtctctctaccactggcttttattctggctgcaatttcaacgccaacagatgctacagcaacagaatctgtaacacatggattgaagctgcctaagaagattgctttttacctaaaagatgagtctttgtttaatgacgcttcaggtatcattttgcttaatatggcagttgattggtacttgcatcaagaattacggattggacaagcaataggtaattttttatattctgcaggtggaggttttttctaggagctttggtggctactttattagttttcttgcgtcaggaaagttttcgctccaaatatcatttatctgctggtgttgcaatgccggttgatgtcatattctttttgacaccgttaataatatattttttagcagaagaaattcacgtttctggaattattgcagtcgttgcagccggattgattcataacgttgaatctgagcgaagcaggcttactaatgcctttattttttataacagtaatcaattatcgcaacttctgattgatattttaaatgggattgtctttttgcttttgggaatcatcattgttcggtcaatgagggaagacattttaatcaacaaacaattgatgcgattttgatcggaataattttatacctagctaatttgcttattagatacttttattatcgatttagcccttctattaaaggaaaaacgagtaataaagaagcattgatttttagtctgggtggcattcatggagcagttacttttgctttagcatatacgttatatgatttacgtattaatgtagcagatttccatttaattttggtgagtgaaattacgcttattttactaagtatgattgttccaacaattgtttttcacatgatcttggacaaagatatacctgattttgatcaaagaaaggaagttgatcgagttcgtgtggcaatgattgagtatgctatggatcaaatgaaaaagatctatttacctaaaaagattcgaaaacaattaaaattcgatttaagggcacaaatgaatcaaacttctatggttgattttgctagggaaataaagtatacaattaaacaaaaagaattacccgatgatcagaaagaatttagagctgaggtatatagatatgcttttagacaagaacgtgactatttaggtaaaattgcacaacaagagagaaaatatcgtcgaggctttctggctttatatagacagattttgatgtcagaagtggtgttcttagatgatgaaaatgattaattttagaaagaagagataatatggcaacaattcaatggtatccggggcatatgaacaaggctcgtaatcaactggaagataagttaggactgattgatgttttggtggaagtacttgatgcccgaattccgcaagcttcaagaaatccaatgattgaaggactagttggtaataaaccacatattattatcttaaataaggctgatttagctgatccagttttaacaaaggcatgggcagcagaattagctggagataataagtatgttttggcacttgactccttgcacaatactaatatgcagaagttggtttccttagtaaaaaaggcggcagctgccaaaacagagaagctagaagcacgaggggcctcaaatcctactattagaattgctttggcaggtattcctaactgtggcaagtcaacggtgattaatcgtttagttggtcagaacgtggctgaagtcggtaacaaaccaggtgtaactaagggacaaagatggctgaaaacaaatgctaatattcaagtgctcgatacaccagggattttatggcctaaattttctgatcaggaagttggttataaattagctgctttcggtgcaattaaggatagtgtttttcatgcagatgatgtagcattatttgttttgaaaaatttacgtgaattttatgctaaggatttgcttaaattttctaaattacctgaacagcaaattgctgatatggctgatccagatttgcttttgtcaatgactgaaaaatatggcatgcgtgatgattatgatcgtttttcattatttatgttacaaaaattgcgtaagggtgcaatcggaaggattacgttagatagaccatgacaattaaagaaataaaagagctgttgaaatctgaggtctctgaagcccaaattaacgaacttgaggcagatccgcgggccggcgtacaaaaattgttagttagttatcgtaagcgtcaagcaaaattactagcaaaaaaagaagagtttttgcgtcgcttttcttatgaaaaaaagttctgggaaaagggacaattagtagcgggtgttgatgaggtaggacgtggccctttagctggaccggtagtaactgctgctgtgataattgatcaagattttgatttattagatgtaaacgactcgaagaaattgagcccagagaaacgattgaagttatatcctaaaattttagcggaagcagttagtgttggtattggagtaaaaagtgcagaggtaatcgatcaaattaatatttatgaagctgaccgtcaagcgatggctcaagcagtacgagcacttgatgttaagccgaatgcacttttggtagatgcaatgaatgtgccagtaaatctaccccaagttaaattgattaagggagatgctaagtcgaattcaattgcggcagcttcaattgtggccaaggtctttcgagatcaattgatggatgattatgatagaatataccctcaatattgctttcatcataatgcaggatacggcaccaaggagcacattgaagccttgaaaaagtatggccctacgccaattcaccgcaaaacatttgctccagtcagtgatttttttgaataaatttcaatttataaaaaaataatggtctctttttgcgtaataaatagtggagggctttttttatgaaaaaaacagaatttctactaaaattaaaattgcaaaaagggattggttatgttaaattgctgacaattgctaatcaggtaactgatgaaacagaaattgaatttgaagaattagaacaaattgaattaactgaggaactaatggatgcatgctatcgcgcttttcaggatgatcagttggatcgaatggtacaacaaattgaacagcagtgtgacgtaatcagttttttcgatgaagcatatccagaaaaactacgtcaaatttatcgaccacctatggtattgtttacccgaggagatatttctttactgcaaaaagaaatcattacaattgttggctcacgctatccgactaagtatagtcaagatgttattaatcgcttggtacctaatattgtgcaatctggtcaggttgtagcaagtggcttagcaaaaggcgttgatgccttagctcataaggctgcacttttcaaccaaggaaaaacaattgcggttattggcaatggtttaaatttttcatatccaatgcaaaattttgctttacaagaagagattgtgcaaaagggactattgattagtgaatatttgcctgatacaccaccgcgtccgtatcgttttcctgaacgcaaccgtatcttggccggcttaagtcaaagcataatcgttactgaggctaaagaaaagtcgggttcactgattactgctaatttagcgttacaagaaaatcgcgatatttatgcagtacctggaccaattactaatgcattgtctgcaggtcccaatcaattaattgaagcaggagctacgccaattgttgattttaaatttaacaagataaagatttgacaattcagaaagtattagttatttttggactgtacccataaaataaaataagaattaaggaggcagttaatgcctactaaagcgaaaagtaaaacaacaaaaaaacgtaaaaagaccttagtcattgtggaatcacctgcaaaagctaagactattgaaaaatatttaggaagaaactatcacgttattgcttccaaggggcatattcgtgatttgcctaagtcacaaatgggaatcgactttgaagacgactataagcctaagtatatttccattcgtggtaaaggcgataccattaaagaattaaaaagcgaagccaagaaggctaaggatgtttatttagcatccgaccccgatcgtgaaggcgaagcaattgcttggcacgtagcgcacgcattgaatcttgacgaaaaagccaagaatagagtaacttttaacgaagttaccaaggatgcagttaaagaaagcttcaagcatccccggacaattgatatggatacggttgatgcccaacaggcaagacgtgtacttgatcgaattgtagggtattcactttcaccaattctttgggccaaagttaaaaaaggtttatctgcaggacgtgtacaatcagttgccttaaaattagtgattgatcgtgaaaaggagatcaagaactttaagccaaaagaatattggtcaattgatgcggaatttgctaagggtaaagaaacttttaaatctgccttttatggtgttgatggcaaaaagaaagaattgcctaatatcgattctgttaaggatgttttggctaaaatcgataagaaaaaggactttgtagtagataaagttgttgctcggcaacgtcggcgtcagccagcagccccatttacaacttctacaatgcagcaagaagccaataagcgtttaggttatcgtactcgtagaactatgagtattgctcagcaattatatgaagggatttctttaggtaagcaaggaacagttggtttgattacttatatgagaactgactctaagagaacatcaccagttgcccaacaagaggcttctaagtttttgcatgaaaattatggtgcagaatttgcagctaagagtcaacgccattttaagaatcaagaagacgcacaagatgctcacgaggccattcgcccaacatctgtatatcgcacaccggagtcattaaagagtgtcctaactacggaacaatatcgtttatacaaattgatttggtcacgttttttggccagtgaaatgaccccagctgtttatgatactgttcgtgcagatattgttcaaaatggtgtgatttttagaactactggttctaaattgaaatttgctggtttcaccaaggtttatgataatcaacaagaaaagaatgttgacttacctgatcttgaagagggtgacaaggtcaagatgactaagtccgataacaaacagcactttacgttaccaccagcacgctatactgaagcatcattagttcacgcattggaagaaaatggcgtgggccgtccttcaacttatgcacctacaatagatacaattcaacgccgctattatgttaaacttgatggtcgttcaattgtaccaactgaattaggtgaaattgttgatggcttaattgaaagcttcttcccagatattactgatgttgattacaccgcccgacttgaaaatgaattggatgaagtcgaagatggtaaaaaggattgggttcatgttgttgacgaatactatcaaccgtttaagaaagaattaaataaggctgatagtgaaatcgaaaaggtacaaatcaaggatgaaccagctggctttaattgtgatatttgtggtgcaccaatggtgattaagatgggacgctatggcaagttctatgcttgttctcgtttcccagattgtcgtaatactaagccaatcattaaagaaatcggtgtagtttgtccaaaatgtggcaaaggtcaggttgtcgaaaagaaatcacgtagaaatcgtaaattctacggctgttctcgttatccagaatgcgactttgtctcatgggacaagccaattggcagaaattgtccaaatgatggccactttttagtagaaaagcattctaaaaaaggtccagtgattctttgtcctaacggtgattatcgtgaagacagtgaaaacgaaaaaaacaattaacatagaaaatataggtgagtaaatgccaaaaaatgtaacagttattggtgcaggtcttgctggtagtgaagcaacttggcaattagctaagcgtggtattcatgttgacctttatgaaatgcgaccaaaaaaggagactccagctcatgaaactggtgaatttgcggaactggtttgtaccaattcaatgagatcaaatcaattatctaatgctgtaggtcttttaaaagaagaaatgcgtcatttagattcattgatcatgaaagctgccgacaaaactcaagtgcctgcaggtggagcattagccgttgatcgtgatagtttcagtaaatacgtaactgacactttgcgtgggttagagaatgtaactgttcacgaagaagaagttactgaaattccgaaagatgggattacaattattgcaactggtccgttaactagtgatgctttagctggacagattcaaaaattttctggaactgatagtttacatttctttgatgcagcagctccgattgtggccgctgactcgattgatatgaaaattgtttataaaaagtcgcgttatgatcgtggtgaagctgcatatttgaattgtcctatgactaaagagcaatatgaaaagtttagtcaggaattaattaacgctgaaactgcgcaattacatggttttgaaaatagcgatgtttttgaggggtgtatgccaattgaagtaatggcagcgcgtggggctaaaacaatgctttttggtccacttaaaccagtaggattagaagatccacatacaggcaaaactccttatgcagttgtacagttgcgccaagataatgctgcagcttcaatgtataatattgttggtttccaaactcatttgaaatttggtgaacaaaaacgagtattttcaatgatcccaggcttagaaaatgcacgtttcgttcgttatggtaaaatgcatcgtaatacttatatggcttcaccagaagttttgacagcttcttacgaggcaaaagagcagcctggattattttttgcaggccagatgacaggtgttgaaggctatgtagaaagtgcaggtagtggcttagtagcaggaattaatgcagcacgtgaagctatggggaaagatactgtggctttcccaaaagatactgcgttaggctcaatggctaactacataactactacgagtgctaaacatttccaaccaatgaatgctagttttgctttgctacctccactagagggtaagaagattcgcaagaagcgtgagcgccatgagaaggtcagtgaacgtggtcttgctagtttagatgaatttaagacggaagttttagattaatgaaccaaaggcaaagtgagttagatcaatttttatcatatttacaaaatgagcgtcattatagtgcgaaaaccgttttagcttatcaaacagatttgcatgaagcggaaaggttttggcatgaaaatggtggattcccaggttggactaaagtaagagaacgtgatatccaggtttatctacaacatttagcagaacgcaagttagcccgtagtagtcagttgcgcaagatgtccagcctgcattctttttaccgctttttaacccgccgcaaactagtggcaatcgatccaactcagggtattactttacgccgtggtgagaaaaaattaccgcaatttttttaccagcctgaattaaagcaggtttttgattcattgaaaggaaataagcctttgacgatgagaaatttggcaatgtttgaactgttttatgcgacagggatgcgggtaagtgaggttagtaatcttactttgaatcaacttgatttagacttacagacaattttggttcacggtaaaggaaataaagaccgctatgttgcttttgatgataaaacaaaaaaatctttgattgcttatttagaaaatgcacgtccattattacttaaaaatgatgatgaacagcatgtatttttaaataatcaaggaactggcattactagccgcggaattgaaactgtaatgcaaaaaacttttaatcaggcaggaattagtggtaaagtacacccacatgagttgcgacatagctttgctaccgcgatgcttaataatggagcagatttgcgaagtgtccaagagttattaggacacagtagtctatcagcaacgcaaatctatactcatgtaacaatggctcatttaaaatcagattatcaaaaatattttcctcgtaataaagaaagttgaggtttaacatgacaacaatttgttcagtaagatttaatggaaaaacagcaattgccggtgatggacaagtaaccttaggcgaaaaagttattgccaaggcaacagcgcgtaagattcgtcgtatttaccatgatcgtgtagtaattggttttgccggtggtgtagctgatgcagtcagccttcaagatatgcttgagggcaagctcgaaagctactcaggcgatcttcgtcgtgctgccgtggaaatggctcaagcatggcgtaaggatccaactctacaaaaattaaatgcaatgttgattgcttttgatgacaaagacctacttttaatttcaggtaatggtgaagtacttgaacctgatgaaaacgtagttgcaattggttcaggtggtaattttgctcaagccgcagcgattgccatgactcgacacgcaaaagatatgaaggccgatgaaattgcacatgaagctgtaaagattgcttcaggaattgatgttttcactgatgataaaattgtcactgatgaaatttaggagtgaaggaaatggctattaagaccccaaaagaaatagttaaaattttaaacgaatatattattggccaagatgaagctaaaaaatcagttgcgatagctctttacaaccgttaccgtagaatgcagttatctaaagaaatgcaacgtgaagtaacgcctaagaatttattaatggctggtcctactggtgtaggtaaaactgaaattgctcgtcgtttagctgatattgtagaagctccctttgttaaagtagaggcaacgaagtttactgaagtaggttatgtaggacgtgacgttgaatcaatggttcgtgacttggtttccgaagccgtacgaatggaagaaaaggaccaatttgctcgtgtaaagactcaagcaactaaagaagcaaataaagaattagttcgtttgttagctccagcagagaaacatgaacgtcgtgaaaatcaaatgcagcaaatgcaagatatgatgtctatgttgatgggagaaaataatcgcgaagaagatcatgaagaggatgtttctgctgatgtaagaaacaaacgaatggatgtggctgaaaagctagctaaaggcttacttgaagatcacgaagttaccatagaggtagaacaagctcctaaggccaacccaatgagtgacatgatgggtcaaatggggatggatatgggctcaatgcttagtgatcttatgcctaagaaaaaggttaagcgtactttatcagtaaaagaagcacgtgaagttttgattcaagaagaatcacgtaagttagttgactatgacgctatctatcaacatgctattgaaagaagccagaataacggaattatctttattgatgaaattgataaaattattgctggtaataaacgtaattctggtgaagtttctcgtgaaggtgttcaaagagatattttaccaatcgttgaaggctcaactgtaaatacaaaatatggcccagtttcaactgatcatattttgtttattgctgcaggtgcctttgctgaaagtaagcctagtgatttgattccagaacttcaaggacgttttccaattcgggttgaacttaacgctttaaccaaggacgattttgtcaagatcttgaaggatccacaaaattcattgcttaagcaatacattgctttaatgaaggcagatggcattaagttagttttcacccaagaagccgttgataaaattgcggagattgcctttgatgttaaccaaggcactgataatattggtgctcgtcgactttcaactattcttgaaaagctcttagaagacgttctttacgaagggcctgatatggaaatgggtgaaatcacagttactgaagcctatgttgaagataagttaggcgatattattatgaataaagacttaactaaatttattctctaattgatcaaagaatcacgaatgaagcattcaattcaaagtttgaatgcttttttcttttgtttttattctggcttattgacgcattaatgttaaaatataagtaattaagcgattacattatgatttttaactgtttgatatgtagagggaaatttagttatggattacacaatcaagaataatatgatcgaagtagtgatttcggatcacggagctgaagttcagagcgttaaaggagctcataccggtgaagaatatatgtggcaagctgatccagagatctggggcagacatgcacctgtactttttccaattgtagggcgacttaagaatgatgaatataagtatcaaggtaagacctatcatatgggtcagcatggttttgcccgtgattgtgattttgaagtggagaatcatacacaagaaagtatcacgttcttactgaaagataatgaaaaaacgcgtgaaatgtatccatttaaatttgaattcagagttaactataatttgatgaataatttattggaagaaaactttagcgtagttaataaatcagatgaaactatgatttttggtgtaggtggtcaccctggatttaacttaccagtaaataatggggaagagaaagaagattattatttcgatatgcatccatctattgctagggtaaaaatcccacttaaaggagcatatcttgactggaataatcgttctctagcttcgactgatagttttattggtttaagtgatgagctatttaaagatgatgccttgatttatgaattacatggtcatgacaataaagtatctttgagaactgataagagtaagttccacatcaatgtttggactagaaatgcaccatatgttggcatttggtcacaatatccaaataccgctaattatgtatgcattgagccatggtggggaattgcagatagagaagatgctgatggtgagctagagcacaaatatggtatgaatcatttggagccaggtaaggaatatcaagctggatttagtattacttatcactctgcatctgatcctgaataaaatattgaggaataaaaatgaaatatttaacttttaataacggtgtaaaaactccaatcttcggctttggaacatatagaattcagcctagaattactgaaggagcggttgtcgaggctttgaaggctggatatcggttaattgatactgctcaagcatacagtaatgaagcagaagtaggcaatgctattaacaaaagcggcattaaacgtgaagacatttttttgaccactaaagcgcaaacaagtggttatagagagacgaagaatgggattgatgaatcgttaattcacgcccagcaagactattttgatttaatgattattcactggcctatgtctgatagtttaggtacttaccaggcacttgaggaggcatatcaggcgggaaagctacgttcaattggactgagtaacttcaaccatgatcaagtaaatgaaattatgaataatttcgatactaagccagtagttgatcaaattgaaacgtctgtctttaagcaacaaaagaaaatgcataaatatttaattgaaaataatattgtacatgaatcttggtcaccactcggtgaaggaatgaaggctttatttaatgacccaaccttactttctttggctgagaagtataataagacagtgccacaaattgcgttacacttcttggtacaagaaaatatcatgactattcctggctcgacgaatccgttacacatgaaggataatttggatatttttgattttgaatttactgctgaagagatggagacattgcgtggccttgatcaaaaacgtggtattggtggctggcctgcaagtatggatcaagaattagattattaattaaataagcatccctaaaacgatcttttatggcgtagggatgcttattttgtcgtcaaattttgttcatatattgcatgatttttacaaatattgcagagaaatctagatttattaaaaatatttccaactgttacgaaaaaacatttttctttaatcattgtgtgatctgactgtgatggaactgcaactcgaagcaggtattatataaaatgtcaattgcaagagaataataaaacaaaaatgatgaatagtaattgacgttttaatttaaggagagatgttttttgaaaactaaatctattttaactaagactattgctgttgctgctttatcacttgcaggtattggtgcaatcaatcaactagataataatgaagcacaagctgccgttgtgcaaaatgatgcagcagtgtatacaactacacaagctactaccgtttacaataactatgaaaatccagttgcaactggtcaaactctagctgcaggtactaactggaagattataaaaactgcttatgattcaaagggacagaagtggtatgatcttggcttaaatcaatgggtattggcaactaattatactactagccaaaatactcaagctagacaagaaaatacctacactcaaacacaaacgccagctcaacaaactacacaagctagccaaagtcaaagttcatacacttattcaaatgtgaactacacacctaagacgacaacaactagttcatattcatcaaccgcgacaggttccgaagctagtgcaaaggcatggattgcaagcaaagaatctggtggctcatacagtgctagaaatggccaatatgtaggtaagtatcaactttcttcatcttatttgaatggtgattattcagctgctaaccaagaacgtgtagcggataattatgtcaaatctagatatggctcttggagcgctgctaaaagtttctggcaagcaaatggctggtactaatagataactccaagttctgactaagatagatttgttgaaatttcaccttcaacaaacaaagacgactactcgaaatgggtagtcgtttttgcttgtttatttttttaattcaaatttactggtttctacatagagtgtcatatttttacgatagtaatttaaagttttcattgaaagatgtaatttttcaatataatccgcttctcttaattttgaattagacaaaacagagtagacataagacatccgaagcttatgtgtagttaatggcatgccgactattgaacggtcaggggcaattttttggttaatattaaaatcagaagcgtaatgtttgccatcgcggcgagcaaacagatagggattatcgttattggcaaaattagtgtgattttggatatattctctgacatcattttctttaacttttaccaacaattcatttacatgcaaaatcataatttcttttggcttaaaaccacaagcaatagcagccatcatcttgatagtttcaggatgaatattttttatttgaattaattctgataaatgattttcccagccaataacatagtgttgcttacgattgaagcgattaccacgtaaagtgagcaatggataagtaatgatgtagccatattcattcaaaaaaacaaaatacatctttatgtgactaagatatttatttactgtattacttttcatatggagtttattttcaagtgaatctaaaaaggagactgtaaaatagtttgtgtaaggatgaatgattccttaaatttatttctttaaacattagaaaaaggagttcctttctcgtatgattggtttgaacaaaaaaacacatacagaaagaagaactccttcatgaatgattttaccaaagattttgctcaagctctattcaatccagacaaaataaatgatttattgcgcaaagagctacaacaggctgttaataacttgttagaagctgaattgactgcctttctgggctatgatccctatgccagaaatggctggaatactggcaactctagaaatggtgcttatttccgcaaagttgatacgcaatttggcccaattgaagtgcaagtgcctcgggatcgcaacggtcaatttcatcagcacacgctgcctggctacaagcagcactcggatatcttggaaagcatgattatcaagctttactccaagggcgtgaccaccagggaaatagccgatctaattgaaaagatgtatggcagccattacagtccagctcaggtatcaaatatttccaagcagatgattccaaaggttgaggcttaccacaaacgcaagctaagcgacaagtttttctgcgtctatttggatgcgacataccttcctttgcgccgagaaacatttgagcgtgaagcagtctatattgccattggcatcaagcctaatgggcacaaggaggtcattgactactgcattgcacctagcgagaacattgaagtctggacagatatgcttcaaaacatgaaatcccgaggcttaaagcaagttgagctttttctttctgatggtgttgttggcatgaaaacagccttggccaggacttatcctaaagctcattttcaacgctgtttggttcatgtcatgcgcaatatctgcgctaaagtacgcgtcgacgatcgtgaaaagatcatgaacgaattcaaacaggtgcatcaacagacaaacaaagaagaagccacagctgtcctgcatgacttctataccaaatggggcaaggtttacagccatgttatcagaagcttgaaagacatagaaccagatctgctggtcttttataactatcccaagcagatcagagcttcaatttattcgactaacatgattgaatcatttaacaatgtgatcaagcgcaaagctaagcctaaggcagagtttccaactgaacagtcgcttgatgcttttattggcattcaggcaatgagctacaatgaccgttatttcaatcgaattcataaaggctttggtcaggctttggtcaggttcaggacaccttagaatcctactttgattaaataaataattaaaaaatcaatttacgagaaagatctatttacacaaaagatttgacagtttcccaaaaagttacgtatatctccagttgtaacattttctacatttgcttcagtagcatctaaactaccagaataataatcccaaaaagttgaaattgaagaacaggctagagaaatagttgaatcggctagtttcttttgttgtttacagtaaatgcgaaatttatcttcatatggaaaagtcaagattgaggctcctttcaaacattcgttaaaaataattatacattatttcaagcacgttgttactaaattttttattaaataatcaaactgcgtgtcgcaaagcgacacgcacacactaagtgtataattttttacggtaagttgaataaataattaaaaaagcccaagtcctttgaatttggacttgagctcaaacaaaaagaccagtagtctgatgttaagaacaaaaaacacattagaagctggtcttttatgaattcaattgtaactgaaatcgcaaatattataaagtctgaagataattatattaagcgtgaaagaaaaataatctgtttcttcttaaacctgattaaggaaatcatggccttggctttagctaaagttgatgatgaaatgattaccaaggttaaagcacagggctatcagattgataagaagaatgagcgctcaatcaatatggcttttggcgaagttaggtatgtcagaagaagatatgtctgcccaggcaaacaagcaaggtatcccttggatgaattaatgggctttgacaaatacaagcgctacagtattttagcagtcaaaaacatcttagaagtaagcagcgttgccacttatcgcaatactgctctagcagtcaattgcctgtctggctttaatattagccatatgcaggtgggcaatttggtaaaaatggccgggaaaaatattaaagcgggccaagaagcagattcaagatatgatgccgcaggcactaagaaaaaggtcccagttttgtatcttgaaggcgatggcgtggtgatcaaaggcactaaaagccggttggaatttcatcgctatcaggtctgtgaaggcattgtcaatataagcaagaaacgcagaaagcgaatcaatgccaaggaatttgtttctttaagccgacttgatgcgctgaacgaagccaaggagtacctggccaatacttatgatctttctgatactgtaattcttagcaacgccgatggcggtgctggatatgccaaaacagacttcgatgacattgtagggctatgcaagcgtcatgagcatttcttggatgtctttcacctaaataagaaaatcaaagaaaggctatattttgcgcctgacctgcaaggcaagctgatttctgctttggaatacaaatacagctatgacaaagttaaaactatcctaaccactgcagaaagccgactaattgatgaattgaataccgagctcaatcatgattatctggggcgcctaaggaattatattgatcgtcattgggacgatattaagccgtttaagaaacgaaaactgactgtgactaaagccattggctgctgcgagagcaaccaccgcaagtatacctaccgtgttaaggggcaaggcaagaaatggtcaaaatctggagcagaaggcatgcttaggatcttaagctgcatcaagaatcgagagctggaattttggcttagcagcgagtttgaagattcagaaataactgtattgactgaacaggaattaaaagcagcggcccgtgacagcttaaagaagcgtcatgaagttcatttaggcatccagcatggcgcattaaccgcacaggtagctggcaatagttatttaagcaagctaagcagaaatttaagtcatataaatatttaagaaattaaggttagactaatggtttaaaggctaccgcaaaaacattgacacttacacgcacacaatacaacttgccaaccaaacagaaaagtcgtatgatgataactgttaactgaataggcgatgacgttcgccattaaccgagtaaaatctaatgacgtctactttatccgataggggtagagtagacgtttttttgtgggaggaatctgtttgaattcaaaatttattaattacattagtatcgctattttcgccttttttggtggtatggcacgtgctggtttaaatgcaaacttcagctattatggtactttttggggtaatgtcataggttgctttttattagcgtttttcacctacttttttattgaaactaaagagattaggcagtggcttgtagttggattaggtactggctttgtaggtgcatttactactttttcaacttttaatcttgatgttttaaaaaatatgcaggctaatttgccaatcgaagcagtaatttattactttagctcaattatttttggctttgtttttgctatgttaggaatgaaaattggtaaaaaagttggtcaattagtaagaaaggaaaggaatacacgatgaattttttgcttgcaggaattggtgcatcaattggagctatgcttcgttatgctattactaattatggtaaaaagcattgggaatggattggcaataaattttctaatttacctacaccgactttgcttattaacttaactggagcactaattttaggcttgatttttggaattggtgctaacacttttatttatgcattactgggaactggagtaatgggtggctatacaaccttttccactatgaatacagaattggttgagctttataagagtaaaaattatcgtggtcttgtattctacgcggtgtcatcatatctgggtggcttggttctagtttattgcggctattatttaggaaatttactgaaataatattgacagcatgaaaaaaatgggtttgcttgaacagattaaaaataagggattagtcctagatggtgcaatgtcgtatgaattggaaaaacaaggcgtagataataataataaattatggaccgcaacagctttgattgatcagttgagcaaagtttatcaagcacattgggattggttaatttttataaaaatggctggttccccaacggctggggtggagtatttacaacaatgctaacagtaaactttgctttttcaggaactgagcttattggcattacggctggtgaagcagagaatcctcagaaagctattcctgaagcaattaggacaacactttggcgtttaattgtcttctttattggctcaattgtagttatggctgcattaattccttatcatacggctggagtaactcaaagcccatttgtgtatgtgcttgacctaattcatgtgccatttgctgcaaatattatgaacttcgtagttttgactgcaattatttctgcggccaattcaggtttgtatgcttcaactagaatgctttggtcgttgggcaacgaaggaacaattcctaaagcattcaccaaaactaataagcgtggtattccagtattgtcattagtagtaagtatgttaggcggaatttttgctttgatttctagtaaagttgctgcctcgacggtttatctagtattagtttctatttctggattagctgttgtattcgtttggacggcgattgcatggtcagaattgaagtttagaagggcatttttaaactcaggtcatcaactcagtgaattgaagtacaagaccccatggtatcctgtaattccatattttgcatttatatcaagcctactttcttgtgtgttaatctggttcgatccaactcaaagagtagcattgtactatacaattccttttgtagctatttgttacttgggacatcatttttggctaaaatctaagaaaaataatgaagaagttttattggaaaaataaaaaagtcactagtgatatatgacactagcaactttctatagcttatatactgcattaaaacaagatcagtatataagcttttttgatacatgtaaaaatttttattcggcgtccttggtcaattcatagatagcttcggcataaatcgcaattgaattaattaggtcatctaccttcatatattcatttgcttggtgcataaccattggagcatcttcaggttgagcgccatatgcaactccatgcttaaataaacgcccataagtcccaccgccgatcacgacttcatgacctttattaccagtctggcgttcataaactttgagcaaggtttgaactaatggatcgtctccaggtacataatgaggttcttcaaatgaagcaaaactttgagttaagatatcaccaaatttttcttcaacttgcttaaccatcttatctggatcagtaccttgaggatagcgaatattatctttcaaaacagcatttccatttttctcgtagtcaaacattgatggagcacttgagagatcacccatcaagtcatcatgatgagcaacgcctaattttttgccgttaaagtcttcatgttcaacatcggctaagaaatgaagccagcttctatcgcgaccagcaaaatcaaattgatctagaaatactgccaaaaatgtagccgcatttctaccaacttgaggtgcagatgcatgggcaccttgaccagttaattcaatcttagcttcatcgccctcaatagtgaattcgccttcaagtttattatctgataaaaacttagtatatttttccttcattgtggctaaatcactaccaacaatagttgcataggccttttgaggagttacgttttcggcaatgccggccttgaatgacttaaggactactgatccctttttattgtcatctttaaaggtcatggtcagggtatagatcccctgttcaccgttgataattggaaattcggcatcaggtgagaatacttgatcaggggttggctcatattttaggtagtaatcaatgccaacccaattagtttcctcattggttcccacaataaaatcaatcttttttttaggttcaaatccagcttctttaagtaaaagcatgccataatatgcagctagggcaggacctttatcatcggcagaacctcgaccaatgattttaccatccttaattaacattttaaaaggatcagttacccagccgtcaccagctggaaccacgtccatgtggccaataatgcctaaacgtttttcaccagtaccatagtcgacacggccagcgtaattgtcaacatttttgatatggaaaccatcacgctgtgcaaacgataagaatttcttcattgccttaactggacctggaccaacaggatactcttcggaagtattattcaaatcctcagatgagtcgattgcgattaattcgtcaagatcacgaagaatgtcgtcctttttggcttgggccaatttcttataatctatattcatattctgcctcttttcttattttttgttagctaaaattttaccagaaaaattaatattaaacaattatacatttaaaatgggaaaataatgagcattaaagttgtttttagttaattgtgtcatgtacactataagaaataatatagataaaaattacagaaagtatatagaaacggaaagattaatatgagacaacatgttcctgaactcgatcgtaatttaagtaacgacgaattcctagatctaatcgttgattgtttccattcagtaatttttggtaccgttgatcaaaatggtgatccacataccaatattatcgatattgactttaatgaagatggtcgtcttatttttgcaacgactaatcagaagtcattttatcgccatattaagggacacaataaagtttcaattaccgctttgcgcggaagagaaactctcactagcattggtttcactctagaaggctatgttgatgaggtaagtccacaatatttagaacgaatttataaaatcaaaccacaaatgcatcatatttatgctaataaaactaaagatatgaacactttacgagcttttgcattaacaccaattattggttctgtttatgatttacggtttgatcatgtttttcaaaaacaattcgactttgttaatgttcctagtaagatgcaggttgaaatcttagaataataaaataaacatgcctcgattttcgaactgatcgaagcatgtttattttatatattcatttctttacgttcttcgcgttttcttaagtatggtagtaagaagcctaagccaaagagtacgataactgtaataatattcataattaattggtgattaaaggctgcactaccgaatgttgcttctgcttcttgaggaataaatcctaaagtagcacagataaaggtaaagattaagcaccaccagcccattataagggcaccagtcttatttttaatgaagacataatctgagtggaacttctcttggtgcatccgtaacataatgaaagcgaagaatacccaacaagtcttgtatggggaaataataccattgatatttaaaagccaattgtaaattgaattaatatttggcaaagtcccagtaagtaaaagcaagaataaggctaaaccacaagttaaagtgtacgagtgaactggacgacctgttttgtcttttttcccagttaaccattttggcatgaatttgtcggcaacgtcaccggcaaagacacgacttgatgcatcaagtaaaactgctaattgggccatcataaagagggcttgaacaacagcaaagatgtacattaatactttgccccaaccaaggctttcgcctagtagttgaaatgcatagtaaggtccgttcatcttgaaatcatgtggaatatgatgagcattgaaaaacattgctaaagccaaagtaccgaagatagtcaagaatccagtcatcaaagctaacatccacattgctttaggaaattcgtgttttggatcgcgcatttgtacgatataaggagcagcaagttctgcaccagacatggcgaagattagaagaccagtggtagaaaagtaacgtaaactaaatgatggcttaaatgcggccaagttaaatggttgggtagcaatatggtgtccatgcataactgaccaaacagcaagtaaaacaaagagcatagacataataaacattgcaccaccaccaattaaagatagtagttcaagtgaattcttgattgcattttcaaccaaaataaaggcaagaataatgacaaaggtcaaaatcccaaaccaaaaagtagacatatgcttgtctaaagtattgttgcccaaaataatccatgaaaaggacacaataactgaattagaaacatcgaccaaataaggaacagtttgaacccaatacatccatgaagtccagtagcccagtgtatcgttagatgaatgacgtacccaagatgccaatccaccggcttgatcagtaaaggttaggcccatttgactagacatcaatgcataaggaataacgtaggcgaagagtaggaaaatccaagatacaactactgataagccttgattttgaaatggataaaaaatattttcaaaactgataatcgttacgaagtcgatcaatgcaataaccggccatgacatgtagtgttttttttcgggttcgaaattgactgtttcgattgtttctgacataaaaattcctccaagttaagctattttattgttgtgttgacatagctgttctcggaggcgagcaaggcaaatgcacttgttaaaaacctccaatatttatataataatttcagctgtagcgtattttaagaaagaatgcaaaaaatacgctatactgtagaaaaattataaagactttttaaagttttgcaatatgtaaaacggtttcgtggacaaaatggaaagaaaaaggatggattttttgaaaattgccattggaaatggcgtcaatgttaataagatgaaaggttggtcgtcaattccaattggcgatgtacaaaatagtgctgaacttgccgcaattgttgtcaaaaatgatgatgcattaggaataaaacaagcagaagctctaagagaacaatctggttttccgattccattgattaaagtaactgatcaggtagatgaagaccaagtcactccgaaagctacagaatatgaaaagcaaatggtgccaggctttttgaccgacttgatcaattttgctcaagcaaaaccaatttcatttactacaccgggtcaccataatgggcaatattatgataaacatcctgccggagtagtttttaataagttctttggtaaaaatctaatgtttgccgatacaagtgatactgttcctcaattaggggatacaatgacgcatgctggaacgccacttaatgcagaaaagaaagctgctaaaacttatcatgcagataaggtttacttctgtaccaacggaacgacttcagctaattctatttgcgcaagtgcacttttatctgaaggcgatctagttttatttgatcgaaataatcataaatctttgtataattctgccttggtaatgagcggagcaaagccggtctacattccaactgatcgaaatgcacttggactaattggagaaatggatccagccttcttaactgaagataaaattagagctgaagtagctaagatagatccggcaaaggcaaaggctaagcgtccatttaggttagcaatcgtacaagcagaaacctatgatggagtcttttatgatgcacaatggattattgaccgaatcggtaaactttgtgattatgttctgtttgactgtgcctggggcggctttgaagaattcgtaccaattatgagacatttatcaccacttctacttaacttgggtcctgatgatccaggtattttggttactcagtcattacataaacagcaagcaggtatggctcaagcgtcacagattctaaaaaaggatgctcatattaaaggacaaaaacgatatgttgatcataagcactttaatcatgcttatctgaagtttgttacttccagttatgcatacccactttatgcttcattaacagttaattcctacgttactgctggagcaggaaataaaaagtggtgggatcaaactctgcgaatgggaattgaatggcggaaaaaactactcaaaaagtctaagctatttaagccattagttcctgacaattttgccgaaatttcgactgatgaattggctaccaatgcagaatattgggaaatgggacaaaatacggattggcacggtttccgtaaaatggttccaggcgaagcaatgattgacccattgaagattacggtaaaaactcccggaattgatgttaaaaatgcaaaatatgagaaagtaggtattccaggcgcggtagtggcagaatacttaatggaaaatcatattattcgagctaaaaatgatttgaattcattgttgtttttacttacaccgggagatagtcaagcagaactagatactttacttgaagcttttttaagttttgaaaaacactatctagaagatgacttaatgaaagatgttttgccggttttatataatgagtatccaaagcgttatcaaggctataccctgaaacagttgtgtcaagaaatgcatgagtactatcaggaaaataatacttttgtattacagcaaaagctattttctaaatcagggatgcaagactatcaaatgacaccagctacagctgatcagctttttaaaaaagatcaaaatgaactggtcaacctagaaaatgttgttggaagaattgctgccgaaggagctttgccatatcctccaggtgttttcattgttgcacccggtgaaaagtggggaacggtagatcaaaagtactttgaagtcttggcgcatgctattgaaaagtttcctggttttgtgccagagattcagggagtatatctgagcgaaaataataatggtagtttatgcgtacaagcagaagtaatcaaaaataaatagggagttaaaaatgagtttttcttggaaagagaatttaccaaaagagttaagcgataaagtgactaaagttgaatcaatgattcaacctcgtttagaaaaaattgatgaacaggttttgtataatcaacaacgtgtattggacctatttagaaaacatcatgttggtgaagaagatctagttccatcaacaggctatggttatgacgatataggtcgtgataaaattgaggatatttatgccgattattttaaaacagatgatgctctagttcgtgcacaatttggctcaggtactcatgcaattacagttggtcttttcagcatgcttcgcccaggggataccctttattatttaactggaacaccatatgatactattcaagaagttattggcttagctggcaataaaccaggcaacatgaaggaatggggcatcaagtttaagactacagaattaaaagacggcgaggttgattatgatcaagctaaaaaagatatcatggatccttcaattaaagtagtggcaattcaaagatcattaggctatgcaactcgtaagacttttaccatggctaagatcaagccaatgctcaagtttattaaggaagttcgtcccgatgtcaatattttcattgataactgttatggtgaattttctgaatgtgaagaaccaactttctatggtgcagatttaatggctggttctctttataaaaatgctggtgcgggtttagtaaaaggcggtgcttttttagttggccggcaggatttaattgatggtgctggttcacggttgacagtgccaggagctggaaaaggtgaaggcgcaacttggggttatttgcgtgatatctaccaaggattctttatggcagctcatactactggtgaagctcaaaaaggtatggtctttactgcagccttattagaagaaatggggatgcaggtttcacctaaatggagtgatccacgtagtgatattgttcaaactgtcacttttggtaaacctgatccgatggtaaaattttgtgcggctattcaacactattcaccaatgaattcatttgttgacccaattccatatcatcaggatggttacgaagatgaagttgttatggcttcgggaagtttcgttgaaggatcaacaattgagctttcttctgatggccctttacgtgaaccatacatgctttatattcagggcggtttgtcctatgctcatgataagattgcgattactcatgcagtagaagaaaccttttataagtaaatttaactctaaaagattcacatttttctttatttaaaagtgtgaatctttttatcttgtttggggtgaattgttaatttagaataaaaagtagcaatttaactagttaggataagtttatgaatccagaagaagttttaaaagatacatttggctatacaaattttcgcccaggtcaaaaacaagtaattgatttagttttaaaaaagcaaaatgtgttagcggttatgccaaccggtggcggaaaatcaatgtgttatcaaataccagctttgattaatcccggtgtaactttggttatttcaccattaatttctctaatgaaagatcaaattgataatttaaagcaaaatggaattaatgcggcagcattaaattctactacaccgcaagaagaggttaatccaattttacgtcaggcatatgaaggcaaaattaagttaatttatattacacctgagcgtttagcgattgattattttagatatcagttaaattttttagatattgatctagttgctgtcgatgaagcacactgtatttcacaatggggacatgattttcgacctgcttatcgtcaattattagatggaatcaattcactaaaaagcagaccaaatatattagctttaacagcgacagccacgcctgcggttcaagatgatatttgtgaacaattgaatattcccaaggagaatatgattgttacctcttttgctcgccctaatatatcgtttaaagtggtcaactcaccacaaaatactccattatatatttcagaatatattaaggcacatcaggataaagcggggattatttacactaatacacgtaaaaaagttgaaagtttgacagattatttggctaagaaaggaatctctgttggtgcttatcatggtggaatggattcttcagaacgaagtcaagtacaagaagcttttcaatttgatgaatttcaagtaattgtagcaactaatgcttttggaatggggatcgataaaagtaatgtcagatttgtgattcatgcctcaagtgcccgtaatatggaaagttactatcaagaagcaggtcgggcaggtcgtgatggggaagaaagcgaagcgattttaatctatcatcctggtgacttgcgtcaatatcgctactttattgatgaatcagatgcggatgataaatatcgagaactgcaatatcgtaagttgcaaacaattactgattatgctaatactggtgaatgtttgcagcaatttatcgtccgttattttggtcaagattgtccgccatgtggtaaatgctcaaattgtctaaatcaggataaattgactgacattaccattgatgctcaaaaagtgattagtatggtttatgaactagatggtcgctttggaaaaacgatagttgctcaatgtttgattggctcaaaaaatcagcgcatgcaagaaatgaatgctacacaatataagtcttttggctctctaagaatgaagcaaaaagatgctataagcttgattgactatttaattgcttcaggttatctagaagttgaaggtagcaaatatccactagtgcatgtaactaatcatgggtgggatgtactagatggcaaaactgtagtcaaacggcgaattgctaagatttcagtaactactactcatgctggtgaagaaagtgatactttatttgaagctttaagacaaaagcgtttggaattagctaagcagcaaaaagtaccagcatttatgattttttcagatcgctctttgcacgatatggcacaaattaaaccacaaaatgaaagtgaatttttagaggtaagtggtgtagggcaagcgaagatgaaaaagtatggtcaggctatgatggaaataatcaaaagaaaaggaaaatagctaaaataataatattaaaatattggtcaaaccggtctttttttattacaataaatgtaaatgaaagaaggactaaatttatggctaaaaaaacattaattatctattattcttgggaaggcaataccaagaacatggctaaaaagattaacggagaaattgaaaacagcgaattaaaggaagtaactgttgctcctgacgcttttgattcagatatgtacaagaccaacgatattgctctagatcaaattcaaggtaaggttccttatcctgaaattcaaatggatgatatcgattttaataattatgatttgattttagtcggtagccctgtttggtcaggctatcctgcaactccaattaagccattacttgaaaagatgaaaaactaccgtggtgaagttgcatcattctttacctcagcaggcactaaccataaggcttatgtcagtcactttaaagaatgggctaatggtctgaatgttgttggtgttgcacgtgatgatagtgaagtccgcgattgggttaaataattaacctttagaatattaaaaatcagtacaaactccgtgttttgtactgattttcttttgtattttaagaacaaaaataagagttacaaaatgtaaccctcatttttatttaggacacgaatcaagcgccgttacgcatgactcctagcttgatgggtgtctctaaatatgtggtatttttatatctatcaaaagaaaaaacagcggtttctttaataaatatcacaacaacacctcatttctatgtcttttaaaagtaagcgcttactttatctaattataatatatcatataacacatatttttaatagtaattttgtcataattttccaaaaattggaacctgtcaaatcttttgtgtaaatagttctttctcgtaaattgattttttaattatttatttaatcaaagtaggattctaaggtgtcctgaacctgaccaaagcctttatgatttcgattgaaataacggtcattgtagctcattgcctgaatgccaataaaagcatcaagcgactgttcagttggaaactctgccttaggcttagctttgcgcttgatcacattgttaaatgattcaatcatgttagtcgaataaattgaagctctgatctgcttgggatagttataaaagaccagcagatctggttctatgtctttcaagcttctgataacatggctgtaaaccttgccccatttggtatagaagtcatgcaggacagctgtggcttcttctttgtttgtctgttgatgcacctgtttgaattcgttcatgatcttttcacgatcgtcgacgcgtactttagcgcagatattgcgcatgacatgaaccaaacagcgttgaaaatgagctttaggataagtcctggccaaggctgttttcatgccaacaacaccatcagaaagaaaaagctcaacttgctttaagcctcgggatttcatgttttgaagcatctctgtccagacttcaatgttctcgctaggcgcaatgcagtagtcaatgacctccttgtgcccattaggcttgatgccaatggcaatatagactgcttcacgctcaaatgtttctcggcgcaaaggaaggtatgtcgcatccaaatagacgcagaaaaacttgtcgcttagcttgcgtttgtggtaagcctcaacctttggaatcatctgcttggaaatatttgatacctgagctggactgtaatggctgccatacatcttttcaattagatcggctatttccctggtggtcacgcccttggagtaaagcttgataatcatgctttccaagatatccgagtgctgcttgtagccaggcagcgtgtgctgatgaaattgaccgttgcgatcccgaggcacttgcacttcaattgggccaaattgcgtatcaactttgcggaaataagcaccatttctagagttgccagtattccagccatttctggcatagggatcatagcccagaaaggcggtcaattcagcttctaacaagttattaacagcctgttgtagctctttgcgcaataaatcatttattttgtctggattgaatagagcttgagcaaaatctttggtaaaatcattcatgaaggagttcttctttctgtatgtgtttttttgttcaaaccaatcatacgagaaaggaactcctttttctaatgtttaaagaaataaatttaaggaatcattcatccttacacaaactattttacagtctcaaaaattggtttgcttgttggtaattcatgattataaattaaaatagataatgactaaatatggaaagggatatttaatgactattccaacgaaaattgaagttcgtggcggacgagtacataacttaaagaatattgacgttgacattcctttgaataaatttgtagcaatttcaggactgtcgggctcaggaaaatcatcactagcaatggggattctttatgaagaaggttcaagacgctatcttgatgctctgtcaacttatatgcgtaggcgaattaaacagggaaatcaggttgatgtaactagcgtcaaacatattccctccgcattagctttacggcagcgtccaagtgtaccaaatgagcgagctacagtaggaaccatgagtgagacttttaatgttttacgcttaattttctctcgtttgggttctccagtttgtcctaatggacaccgcttgaagccgagtttggcaattgcaaaggcaatgagtatgtcaggtgagcaaatgggacaattaacttgtccagtctgtggtgtaaaattttatgcaccaagtgccgaacaatttgcttttaattcagatggtgcatgtactgagtgtggcggaactggtaaggtacggcaactagatgaatctaaactgattacggatgaaaatttgtcaattaaagatggtgcagttgcatcttggagcttgccaggacggaactttatgcctaacgttgcagaacatgctggtgttaggatcgacattccttataaagatcttactgataaagaaaaagattttgtcttaaatggtcctgaaaagaaatataaaatggactttttatcaggaactggcagggtatttcatgattttaatgccttatatgaaaatgctcggcaagctgtctatcgttcagcaaagagtagcaaatcagaacgtgcgcaaaaaagaatagccgaattctttacttattcgacttgtccactttgtcatggtagtcgtttgaaaccagaattgttacaacagctgatcggtaagcaaaatattaatcaggtggccgaaatgcagttaggtgatttagttacctgggttaaagatgtgcaagcaactttaccaactaatatgcataaaatggctcattcgattattcaggagtttttggataatttgcaaccattattagacttagggctagactatttgactatggctagaagtggaaataccttatcgacaggtgaattgcaacgaattcaattagcaagaacattacgtactgaaactactggagttttatatgtcttggatgagccttctattggtctccatcctgctaatgttgcaggattaattaaggttttacgaaaattagttgctcagggcaattcattagtagttgttgatcataatgttgacattattaaagccgctgatgaagtaattgagattggaccaggttcaggtaaaaaaggtggtcagattttggatcaagattcaattactgcgatcaaacatgatcagcattctttaattcgaccatatttggatggcagtgctaagctacttgccagagagccagccaatcaaataaattccgattctatttcatttgaagtaaagcaatattttaatttacatgatgtaaaaactaaaatcccactaaaccaattaactgcagtaactggtttttcaggtgccggtaaaactagtttgattttggatagtttagtgcccgctattatagcaaaaagcaaaagtgaaaaattgccaaaacaaattagtagcttttctagcccaatttcaaatgtagtaagtgttgatgcatctccaattggtaaaagtactcggtcaactgtagcaacttatacttcaattatggacaatttacgaaagttatatgctagtcagccactcgttaaaaagaagcattatacgccaagttggttttcatataataataaacaaggagcttgtcctacttgtggtggtacaggaattgtgactcttgacatccaatttttaccagatatgcaacaagtctgtccaacctgtcatggcgatcgttataatcaagatgtacaaaaggtgaagtggcatgatctgtcaattgttgatgtcctaaatctagatgttaatgaagctctaccgatttttgttaaagtgcctaagattgaacgagagctaaaattgttaaaagaagtaggcttggattacttacatttgggagaagatacaccaactttgtcaggtggagaagctcagcgccttaaacttgttactcatcttagtcataaacaaaatgatacattgtttgttttcgatgaacctacgattggcttgcatcctcttgacgtgaaggttctggtccaagtaatgcaaaagttgttagatcagggagctaccattattacaatcactcatgatttaaatttaattgtcaattgtgattacatgattgatttaggcccacgtggtggtaaaaacggtggtcggattgtccaagagggtaagcctttagaattaaagcaaaagcctgaaagtttaacggcacactatttggctaattatttacatgatttcaaaaatctattttaatattatatgaaaatagcattaaataaatttatagcaaactgtagctaaaaaataagacataggaagaaataatatttgaaacagatctaagattaatgtaatattaaatataaattaactatctactcaatttatactaaggtgagaaaaatgaatttgctcaaacagatccgtgatcgaggattaatcttagatggtgcaatgtctacagctcttgagaagttaggcattgatacaaataatgaactttggacagcaattgcattagaacataatcttgctcaaatttatcaagtacatatgaattattttaaggctggagcccagatggcaattactgatacttatcaagcaaatatcccagcttttgaaaaacatggttttacacaagaccaggctactaaattgattactaatgcagttcaaattgccaaaaaagcccgtgatgattttgcaaagacaacgggaattcataattatgtagcggcttcagtaggaccttatggtgcatatttagctcaaggggatgaatttcgcggagattattctctaacaacggaggaatatcttaattttcatttaccacgattgaagattttattggcaaataaacctgattgtctcgcacttgaaactcagcctaaattggatgaagttgtagcaatcttagattggttaaaggaaaatgctccggaatttccagtgtatgtaagttttacattgcatgatacaactaaaattagtgatggcactcctttaaagcgggtagtgcaaaagcttaatgaatatgatcaagtatttgcgattggagccaattgctttaaaccgtttttagcaactgcagtgattgataaaattcatgattttactgataaacaaattgtcatttatcctaacttgggtggcgtttataacgaatttgagcgcaattggattccatttaatgcaaaattcgattttaaaaagttaagtcaagagtggtatgaacatggtgctagaataataggtggctgttgttcgactaccgaaaaagaaattggccaaatttccgccttttttaagacaattaacaatactaaaagcaaatcagttaaatcagagctaaaaaaggttaaaaatgatagcaatatacaaatttgatttttaataattcatatactttttttgaaatttatcaagtaaaaatctttatctttttatttttatttgatatcatagtagcggagcgtgtgatgagcgctccgaggatgaaaaggctaagcaagatgtttcttatgacatctgctgataggaagaaatttgaaggtgtagaaaagccattaaggacattttccttagtgactttttctttttgctcaaaataaatagccgacttatcgtcgactatttttaatcttaaaaattatttttgtctgtttgtggagtaactttatcccaaattgcatctactaagccaatccacattaagcccatagcaactgagccgcaaacatcacttggccagtgagcgtagagataaactcttgaaatcattactaaaacaagccaaatagctaataaaacagtgagccagattttagcagttttatttttaactaaagctggaatcaatattagtattagccagaaaacaataatcgccattcctaatgtgtggccactaggaaaactgaagccatcatcagcagctaagtgagcagttggtcgtgcccgttggattatatgtttaacaatccaaccaaaagcatcagctgtaactagtgaaatgacaatacttgccgaaagaggacgctgctttttcagccaaagaatgacagctatcaacagcatccaaactaagtcaactttagtatctgctaaaaatgtaattacatgcataatgctctgcagattaggaatactgtggactaagccttcaaagaaattgtcaaagccggtaacccaacttgcatgagccataatagagaatgcaagaatcaaaaagatcagtaatccgatacaaatagaataaatattttttttgcgcattttttcctcgtttatacttatttttataacacctgaattgtcaaattaagtgcaacagttaggctatgaggaaatatattgcttgaagagttcttctgctgtgtgatattgaaggattcgacgatgtttgcggttaatggcatcagttgcctgttgaacataagcagctgacttatctttcatgcttttgcctttagggaagaattgacgcagaagtccattgcagttctcattggtgcctctttcccatggagaatatgggtgggcgaagtagatctggcagcctttgatcttggtcatatccgcaaactcagagccattgtcaaacgtgatcgatttaaaccaggcaggatgtctgtcaatctcattttgaagcagcctttggcatgtgcttgcccgatagtcaggaatcttgataactacttcaaagcgtgtggttctttcggtcaaagtcattaaagcaggctgattcttgcgtctgacgcctttaaccagatctccttcccagtgcagcggcgtttttctgtcttcaatctctttaggacgctgttcaatggaattgccaagatgcttcttgtgcaaagcatgaccgctatggccgtgatgacgcttgttcctgcgtcttttgagcttcataggcagatcaatattgcttatgtccagcaagccctgatcaatatagcgatagacagttggtgtgctgggacaagggtagcctggcatagtccttttgaattcaccaacgaattcatcgatgctggtggcatcaaatttagctttaaagcgtctggagagcattctcaaaaagacagcataatgcttcaatggattgcgctgatagcagtttttgcgacgcttctcataataaatctgtgcagtatcagcgtaatagtgctcatacaataaatagctgctgtctctttgcaggacacttccgcgtttgatttcgcgactgattgtcgacttatggcagccgacttcttgagcgataacagtacgggaagttatgccggaatccagcattgcttgaatttgtccacgttgtacgctggttaattgatgatagtgcttagaaatgctagaatttgaattggtcataaagatcttcctttcttgatttttcgtcacttcaagtttaggtcttcatggcctttttgtttaacacttagtgttgcacttcaattttaaatccgggttatttttataacaataatgagtttatcatagaatatgagtagaaagagaaaaattttaaattaattggaaaataatcatggaaattaaagagataaaatctaataagaagcagtatatagacttacttttgttagctgatgaacaagagagtatgattgatcgctatttagaacgtggaattatgtatatcttgattgataaaggaaaagttagatctgaatgtgttattacggttgaaaatggtaatacagtagaaataaaaaatatagccacttatccagaagatcaaggtaaagggtatgctaaacatttgattaattttattgctaagaagtatcaaaataaatatcaaattttgcaagttggaacgggtgatagccccttaactattcctttttatgaaaaatgtggttttaaacgctcaggtaagatcaaagatttttttgtaaaaaattatgatcatccgatttttgaagctggacatcagctagtagacatgatttatttaagtaagcgattaaattagaaagtaggctttatcgatggaagaaaatactaaaaaaatgttggcaggtaaaccatatcgcccagatactgaagaactgaaaaagattttcggtttagctcatcgcttatcacgtgattacaacatgactactgatgaagatgaggtagaacggaaagcaattatcgatcgtctttttccgaatcatggtcaaaatgtatatttacaaggaccaattgaagtggattatggccaatttacacacttaggagataatttttattctaatttcaatttgactattttggatacttgtcccgtaacaattggaaataatgtaatgtgtggacctaacgtaacatttgcgactccattgcatcctttgttgccaactcaaagaaatgctcgcaagcaatcaggcggaaaaatagccgatattgaatatggagcagctatcactgttggcgataattgttggttagccagcaatgttactgtttgtcccggcgtaaaaattggtaaaaattgcgttattggagctggatcggtagttactaaagatattccagataattcattggcactaggggtaccggctaaagtaatacgtcagattactgatcaagatcatttaaataattatccatattagaaaaagaaaatgtatacgttctcattgattctttatcaaaattgtaaccccaatgaaaaaaataaatgctaatattatgggtagaatttacataacattgctgggggaatttaaaacgaaacgtattaatttaaaaaaaacattaatcaaatcaaccatttggttaactatagctgcttcaatgcctgttggaatggcaattgctaatgccaatagctcgacagttcaggcagcaagttataacaaaactgaaatgcggagctttgttagaaatacattagctagttattatgctcgtggtaccgtagttatagtaaaagatggacaaccacaacaaatttcttatggttacggttattatggcaagcgattaggtgcgggaaacagtaaggtagtttatcctgtttgttctttgcaaaaagtaattaccggcgcaattatcactcaattaatttctgcagggaagtttacacagtatactaagatctctaagtggtatcctaatttaaaaggtgctgataatattaccgtcggcaacttgatgacgcatacttctggattgacagcagctgatactgaagtaaatagaggacgtgtttattcagaagctgatgcaattaattgggttgttaataagctaaactcaactacgcaaaatcaacctggtaatttttcatacaataataccaactatattttgttagctggaattatacgtcaagaaactggacaaagctacaagcaaaatgtgcaggaacgaattattaataagcttggcttaaagcgaacttatttcttggaagatattccagccgggatgacggatggtatctcatatacctggaatcaaaagaattaccaatgggctcaatatgttaaaaagactcaagcttctcaattggtaggtgctggtaatttgttctcagctccaatggactattaccgtattcaacttggtttaaccaatgggcaaattttgagtcgaacagactttgattatatgactcatttaacatcacgttcatcaaatggttattcaggtggtttatatatgaagaataatgataacttgaagttagcatatggtaacttatataatactcactttggtaactggattcagatgactacagataatcaaaatggtttgattatgttcttaaatcaaactcaaaatgatgaaaacagaaataaacaaattggttatcaaattttgaatcatatcaaggctaatacatttagcgcaaaataaaatttttcctgctttaaacttcatgttaagcttaaagcagggtttttttgattggagtaaaaaagatggttaatggtggcgtattagttagccaagatttatcttgtgctggtcaagtatcacttagtgcagctttacccgttttaggagcatgtggcttgagcccgaccgtattgcctactgcaattttgtctacacatacgggtggctttggtgagaatacttttttaagtttgaataatgaaatggctaagattatggcccattggcaaaaggttggttttgatttttcagctgtatacttaggctatttgggcaaaagagcattagatttttggacagaaaagattagctattttaaacaaaaaaataaattgatcttgattgatccagtaatgggtgatcacggtcaactttatcgtggcattgatgaaaactatgtaataaagatgcgaaatctagttaagtcggctacgattttaacgccgaatatgacagaagcagcatttttattaggcaaaaaggcaactagtaattcattgaaaacagcaacagaatttgcggctgaattatctagtcaatttggtgtctcgaatgtcataattaccggtatttcacttaataaggaaaaaattgcggaagttggaattacagccgatcatagttggtctttaattcagaaaaaactcccaggtaattattttggtacgggagatttgtttgcaagtgcattttttgctgctttaatgcataaagaaaatttagaaaaagcgtgttcaattgcggccgattttgttgcacaagcaatcagagaaacacccaagcaagattcacgtctaggaccaaattatgcagcagctttaccagatttactgaagagatggagtaataattaataatgcagatatttagagaaaacaagaattctttacaagctttagttttaacgggactttttgcggcaattatttatattgggatctgggtgttaagaatccccgttcctgctatggtaggacgcccatttattcattttggaaatacgctaactgctgtagcaattttatatttaggttatcgtaatggtatgattgcgggaattattggtctaggtggttttgatttgttaaatggctatgccgcaacatcatggttaactatgcttgaggtagtagtagtggcttcggttttgacagcagtttatcgaggaatgcactatcaagatagtaaaagaaatattattattttaggtattattgcaggggtaactaagatattcactacttattgcgtttcaattgttgaagctttaatggtggggacgagctttaaagtagcgttagttggagcctttgttagtttgcctgcaactgtaatcaattcaatttctactgcaatttgtacaccaattttatattttgctttgcgggatgctagtcgtctaattataaaaaaggttagataaatcaatagattttacacgaaatttgcaaggtgctatattaaagatattattactggcataaaaggtaggatagtatgaacgaagacctaaagaaaaagaataaacgaaacaatattattattttaacgattgcagttttaattatcgttggagtaatcgcgggttttggcattcataatcaccgtgtggcaacacaagctgcagcagaaaaatatgctaaaactcactttaaccctaatgttacaatcgatggagttaaagtaggaaagctaaccgttactaaggcaatggctaaagttaaccaaaaagctaaaaatcaagttgagttaaaaaataacaaactggtttatagctataacactacagtccaatcattagatgagtccgagacaaaggccttttttaagaagcaacaaactaaaactccatcgactcagacttataagtttactactagtaatttagctacagctaaaaagaaactaactgacttaagcaaagcagagattacttataaaattaatggcaaaaactatcaattaaaggccaaagatttattgaataatgtgacttatcgagataatcgctatcaatttggtgatactagtaaattaacgactaagttaaatcaaattgataaagaagtttcaacattacacaagagctataaatttacagtgccaaagggcaataaagttaaaggcaaaacgataacggtaaagaataagacttggggttggggcgtttatgttaaaaagacgcaacgcttacttctcgaagcatttgccaaaggccaaaaaaattttgatggtgcagatgcactttacggtttaggctacagcacttatcctcacggctatggctattcaaataaagaaattggtgatacttatgctgttgtatcattgaaaaagcaagaggtatggttgataaaaaagggtaaactagccgttcatcttcgtgatgttgttaccggtactatggaaggttctaagggtgatcaaactccgcgtggggtgtggtatatccactataaggaatcaccaagtacattgcgcgggaccaatgatgatggttcaagttatgcttctccagttaagtattggatgccatttaccttaagtggctgtggttttcacgatgcctcttggcggactgattggagcaagaccgcttatctaaaaggtggttcacatggttgtgttaatgttaagccaagcgagattcgaagcgtttggaacaatattaaaaagggcgaacctgtaattatttacgaataacatgtttaagggatccattaagttggatccttttttatgaaacaatttttataaggtgaaaagctatttgattacttggaaaaacagctaaatgtaaacaataaacgtgaaacattgctctgaagcccgatattatcgcgattgtggataaaaatataggtaattcacatctattactaactcaattaatatttttttgaaaaaagagtagaaagatgaacctttgtttgatataatttttatgcgaactaatggtctgaaaatagaaagatgagatgataatagctatgatgcaacaagaggaattagaatcacaggaagaaaaagttaagtttttggatgaagactggttgaattggaactaaaatctttaaatgtataattcacttctgtataattaaagaaaaataaaaatttattaactctttcacctaaaggagtaaattatgcaagtaagaactagatgttttcaaagtttagattacgaagatttgtgccgggttcatgatgcggctcgtttgcaagaaatgaaaataggcggagtggagaaatattttattccgtttaaggaagcaccatactggtataatttctttgattctgagattaggattgtagaagttaataatgaatttgctggctttgctgcgtataagccacataatttagcttatttttatattgatcctcaatttcaacgacgtggtattggtgatcaattgctagcttcagtgttaccaaatattagacggccgattaggctagaagtctttagcgcaaatatagcagctaaagcgctgtatgcaaagcatggttttaaaattatcaaaacagttaaagagtcgtggtggtcagaccccaagtctgagccagtttcaagtgatacgatggaattagtgtaagaggcaatattaatgagtttttataatttagattatgaagaaaaacggtttattcagttagctaaaaagaatactcgctcatattatgaacatcatgatcagattccttcctcacctggccaagttgagctggccaaagaaatagtaaaggaaatgaaagagcttgggcttgatgcttactataatgaaaaaacagcttttgcaattggaaagttaagtgcaaacacagcagaaaaggtaacgcctattggcttctttgctcacgtggatactgcagactttaatgcagttaatattaagccacaaattcacgaaaattatgatggtcagaaaattatcctagatgagaaagataatattgttcttgatccaactgagtttccagacttattaaatctaaaaggacaaaccttaattacttctgatggtcatactttgctaggagttgatgataaggctggaatcactggggcattagcaatgcttaaatatttaactgaacatcctgaaattgaacacggtgatgtttttgttgcttttggtccagacgaagaaattggctgtggtggtcaatattttgatccagctgattttcctaatgtagaattcgcttatacattagacaatgggcggccaggagattttgaatacgatacctttaatgcgtcagagattacgatccatattaaagggactgtagttcaccctggtgaagcatatggtctgatggttaacgcaacaactttgatgaatgattttttgtctaatttacctcaggatcaagtgcctgaaaagtcacgtaatcatgatggttatttcttggttctacatgctcaaagcaatgttgatcatgccgatattagcatgattattcgtgattttgatcaaagtgaatataaccgtaaagaacagtttattcgcgatctagttaaaaagatgaacaaaaagtatggcaatagatttactgtaaatattcgtgagcaatatgaaaatatctacaactatattaaggacaagccatatattgtaaatctggctcttgatgcttatcgcaagtctggactaaagccaaatgtacaatcctttagaggtggaactgatggaaactttatttcgcctaaaggaattcctacacctaacttatttaatggtggtggcaattatcatggccgatacgaatatgtgactgttgagcagattgataaattagccgaagtgttgactaatattgtgactgaacatttgcgtcaaactcgcactggtaggaatgaaaagccactagaaaaatattggtagatttaatagccgttttatttaacaaattaatactgtagcattaggatataagtggctagatgaaatatccttcctccttagaagtgataaataccattttcttcattgataatcttgctacatattgcagtgacgctgtatttgcgccgctgcttttttgttattattggtaataaaatacgtaaaaagtacgtaaagttttttcgattagcatttaacaaataacttaaatagaactaccatataggtggctggacgagaatcttctctcgtagaagcaattaataaaccaattttcttcatttataatctaaccaaaaaggacagggatgctcaattgcattgctgtcctttatttttgataatcttcgccgtaaatataacgatgtaattttaggtattgctcatataatctgcgttcattttgattgtcttttggaaaataatattgtttgcctttgagtcccttgggcatataattttgcttggcgatttgatgcggagcttgaaaaggtgactcagctaggccagctcccgtgatttctttagcgtgtttataatgaaagtcacgcaaactattaggcatgggataccgattgggatgatcactatcttgatcaagtctttcccaaatttcctcaaatgctcctgattttggcgaaatacacattaacattgttgcaaacattagtggatatttagctttaggcattcctatcttttcagcttgattagctgcagtaacaatttgagttacttgttgcggattagctaagccaatataagtatatggaatctcacgcagacgccgtacaaccgaagctaaatctccattttttagcaaaatagcaagataataaagtgcagcatctgtgtcagagccagccatagagtcagaatatgcagctaaataatcgtaatgtttagtggctttcttatcatagctaaagaattgctgcttagtaaacgatttaacatttgctaaggtgatctttttaggattaagtgcatgaacagtctctaaaatgtttaaagcaattcgtaggtcgccatcagctgcggctgctatcaaatttaacgaatttttttcaacttggtgatctactaatttaaggaccttagtacatgccttgttcaaaacagctgcaatatcgtcttctgttagaggattgaactcaaagatttgacaacgtgaccgcacagctggcacaatcgacataattggattttcagtggtagagccaacaagtagaacgtgaccattttctaaataaggtaataaaaaatcttgtagatttttggtcatacggtggatttcatcaattaaaagaacgagagtctgatacttataagcattaataatgttgttcaactgtgctttattatcaattgaagcattaaaggaagcaaagggataatcattctctttagcaataatttgagctaagcttgtctttccggtaccaggaggcccccagagaagtaaagaaatattaacatgctgcttgataatatttcttaaagcctttcctggtcccagcaactcactttggcctaccatatccgccagtgtttgcggcctcatttgttcggcaattggtgttttaaaattcatcaaattccttctttcagtaaggtaagtatactattttcaacaatttttttgtaaaaatagcttgcactatcaaaaagtaagttatacaatagaactaatgtacgagaagttaacgagttttttagaaagaggcgtattgtatgattactctttatatgtcaacaagtagtgcatcttcacgtaaggcgagagcatggcttaacaaatatcatctttctttcaaggaaaagaacgtctttaaggaattatctaaagaagatgtccttcatctgttgtctttaactgaaaatggaactgaggatattttatctactcgttcacagtctttccaacaattaaagaataagttgaatgaagacttgtcattgtctaaaatggttgctttaattactcagaatccaggattattaaagagacctattattgcagacgaccatcggatgcaggtgggctataatgaagaagatattcgtcagttcttgcctcgtgatatcagaaaagctgaattaattgaggcacaacggattgctgatgctgcttaaataagacaaaaaacgatgaatttacctttgtgggtgattcatcgttttattttgctctaaatttttatttagctgaacctgggcgttgcttcttggctacttttttacccatagtcatgttgtcattatatccccatacccaaactgcaataaatgaaactataattgaaacagcactggcaattaggaaagtatagaaactatttagttgagtaggatgggccgggttgaaaaagcttgagaagccaattagaccaccggtaaagccatacatagtaccatgcattaaaccagtaactaggccaccgaaggctgagccaatacaacctgaagcaaagaccttcttatatcttaagttaatcccataaatagcgggttcagtaacaccgcagaaggctgaaatagctgctgcaattcctagctctttcatatctgctttctttgatttgattgcgactgcaagaacagctgcaccttgggaaaccattgttgcgcagataattgcgtttaatgagctttgaccagttgaggcaatttgttgagcaactagtggcacaacgccccagtgaagaccaaaaataaccaataactgataaaaggcaccgattattaagccgccaacccagccagatgcagatactagccagttaataaagactgcgataccatttgcggctccttgaatgattggaccggtaataactaatgtgatagttgaaactacaaggatagtaattaatggggtaaagatcatttgcaagtaactaggcaaaactttctttaaccactgttcacattctttagctagccaagcagctaaaatcattggaaagatagagtaggaatagtttaagaattggaagttccaagatccaagactaaacattgtcgtcatactcttgccccaagtaatcatttgtggataaactaagaaaccgccaattactgcagcaatcattggatcggatcctaaccgcttagctgctgcaaatcctactagaactggtagaaagaagaaagcagagtcggccatagcactaactgtgacatagaccggactcttgacgctaagtaaagcaccaagttgtggaagggtgagtagtgcaagtaagcctttgatgatacccgatgctgcaataacaccgattacaggactcattgagccggtaataaaaccaattagattactaaaggctctagaaacaggatttttaccatcatcctgattattagtttgaggtgaaggattgtcactaagaccaggcaattgtttcataactgcatcgtaaacattggtaacctcattaccgattacgacttgatattgaccaccagcatgcataacgtcaagtatgccacgttgattttttaaaatatcatcattggctttagactcatctttcaaataaaagcgcaaacgtgtgatacagtgaatcaggttatttatattatctttaccaccaacattcttaataatgaaagtagctaattcatcatacgaaagtttcttgtctgaactatcttcttttgactcctttaaataagctcgagcaactgtatcgccagcttctgctttaccttcagttacatctaagccatcaagtttcatagatgaattggtgattaaagtcataatcgtagtatcaagatcttttgctttaatcatctctatattcatcgtggcaatttggtcaccagctttaacttcctgaccatttttaattactacatcaaacggttcacctttaagtccaaccgtatcaactcccatgtggaccaatacttctagaccatctttagtagtaattccgatcgcatgctttgtttcagcaatcattgagatagtgccgctaactggtgcaagaactgtattatcagttggtgttaaaccaaaaccatcacccatagttcctttgctaaagataggatcacttgttttacttagtgcaattacttgaccattagcaggagcaagtaatgcaatttcgtttttattcataagtgttattctccctttcctataaaagcgttttcacaaaattcatttattataatattcctgtacgtacaagttgtcaatagatttttatgaaaatgattacatgcctgcaatatagtttttagatatatctattgacatgtacgtacatcaaaaatataatgaacatgattttaagaaaggacaaggtcaagatgactaaagcaaaatctgaactgatcgctcaagacttagcttctaagattaaacatcaacaatttaaggaaggcgagcgcttgcctagtgaaaatcaattgacagagctttatggcgcgtcacgcgaaacagtccgtaaagctttgcagcaattgacctcgttaggattaatccaaaaaatcaagggcaaaggttcgattgtccttaatttggaaaagttttcgtttcctatttcaggaatttctagctttgcggaattaaataaatcattaggaatgaatgcaaaaactaagctacttaatgatgaaatggttgatgatttgccggcaattttcaagaaattcttccctgaacaaaagaagcatgcagggatctatgttgaacgtttaagaatgattaacgatgaaccagaagtgctggactgtgatttcttatttaatccaccaattactgagcttccatcagaagaagcagaaaaatcaatctacaattatttagaaaataaattagggctagatatatcctatgcaactaaggcaattacggtagaagaaatcgatgctgatttacaagagaaattgcaattggatagtaaggaagcagtactagtagctagtcataattttttagcagatacaacgctgtttcagttaactttatcctttcataatcctaaaaagtttaaatttattgactttgctcgtagacagaaaattaagttataggagataaaaatgacagatttaggcaaaaaagtaatttaccaaatttatcccaaatctttttatgattctaatggcgatggagtaggtgatattccagggatcatcgctaaaatcgattacatcaagaagcttaacgttgatatgatctggtttaatcccttttttgtatcccctcagaatgatggcggttatgacattgcggattattaccgaattgatcctcgctttggcacaatgtctgactttgaggaattaactaaaaagctaaaagaaataggcgttggcgtcatgttggatatggtgctaaaccattgttcaaccgaaaatatatggtttaaaaaagctttggcaggagacgaaaagtaccgcaaattcttttacttaagaaaagctaagcctgacggctccttgcctaataattggcaaagtaagtttggtggaccagcttgggcaaaatttggtgatacggattattattacctacatttatatgatccaactcaagcagatctcgattggcataacccagaagttcgtcaagaattgttcaaagtaattaacttctggcgttcaaagggagtacatggtttccgttttgacgtaattaacgtgaccggtaaggatgaaaagttagttgattcaactggtgatccaagtcaggaaaagagtctttatactgatacagcagtagtgcatcaatatttgaaagaaatgaatcgctctacttttggtcaagatcctgactcaattacggtgggtgaaatgtcttcaactactattgctaattcgattgagtactctaagccgagtgagcatgaattgtccatggtctttactttccatcatttaaaagtcgattataaaaatggtgaaaagtggtctaaagagccgtttgatttcatgaaattaaagcacttatttactgaatggcaagaaaaaatggatcaaggtggcgggtggaatgctttgttctggaacaatcatgaccagccgtgggcccttaaccgttttggtgatactggtaaatatcgagagaaatctgccgaaatgcttgctactgtgacacattgtatgcgcggaactccttacatttatatgggcgaagaaataggaatgatggatccacattattcttcaattcatgattatgtagatgttgaagctaaaaatgcttttgcggcattgaaacaaaagggaataagcgatgatgaagcatttgcaatagtaaaaactaaagcacgagataactctcgtgtgccgatgcactgggatgatagtaaatttgctggctttagtgaatcaaagccatggcttttaccaacagatcaagatagaattaatgttgaaaaagaattacacgagggtgaaatttttgcttactatcaaaaattgatcaagttgcgtaagcacgaacaactgatttctgatggccatattagaatgtttttaaaagatgatccacaaatttttgcctatgaacgttttttgaaggatgaagctaaaaaaatattagttttcactaatttcaatggtactgatcatgtagtaccattgcctgaacaatatcaaaataagaattatcaactcgtattgagcaattattctgcacaagatggcaaactaggagagaatatctcattgaagccatatgaagctttagtaattaaaattaattagactagtataattaattgtgttaaggtaaaaatgttcgtgaagatttcgatttacggacgaggaattcgcgagaagtcatgattttcaggtcatggcttttttttgcataataagcaaaattatgtaaagtaattgacagcttgcttataatagatagtagagagaaggaaaaacgatgttagttgattctgatagttttatttcagttgaaaagaagctactcaaacaaggcaagttgcaaaaatttgaaaaagaaactggtccagttaccagtttaatgatgattagtaaaggaagaattgcggacgatatgcgttatcagttagtcgagaacttggcacatcatccattacatatagtctacaaggcctcatttgatcaatatgatgaaaccctgaattgtattttcgatcgacaaactaaaaagccaatcacaggtttatggtacacgccgcaaagaagagactttactgaaccgcctaagaaaatggtccagctttttatcagcgaaattgtaaataatttgactgattcaacaggaatagatttgccaatctgggtctttatcaatgataaggcacatttggcagttactaagaaagatttgagttaagaaaaaaatcagtgcgaaccctatgtgaacataaaaatgagggagtttcgcactgattttgttttgtattttatgtgttaactcttctttatatatttttgacatagtataatagttgatgaagccaaatatttaccccagtcaaaagtaggtgctttgcacgtcgcactctatgtgagtgcttaaattaaattcaactcttgcaaatgcaaaaaagcatccctaatcaaaatagagaaggggatgcttttttaatatcattattgacgccaagcgctatctaatttttgttgaccagccttaatttgagcattaacattttgatgcttatttgcagcaattaaaatattttccataatttgattcataccattataagcagagtcagaattcttagctacaggaacactgtagagatgcttcattgaatcctttaagacacttggcaatttcatcttgctgtctaagtattccttactatttaagacattatcgttaacaggaatatagccagtctcattagcccaagttaattggctagatttgctagtcaaaaacttcatatatttcatggcagcatttttttgtgcttttgaagcatggttaaagacataaagatcagtcccttgagaaatagtgtattcaccgggacgaggagcaacgccgtacgtaaacttgttgcctacacccatcttagtgtagctttcaccagctgaagtaccgatgtacattgcgactttttcattagcaaaaggaccggagaggtaacgttcactaccagcagttctaaagtagccattgcgtacgccatctgcgtagaagttaataactttcttagaggcagccgaatctaacttgattgaacgaccaaaagtttgtccttcattcttgagacctagaacatagtagttggctaagttatcaaaaccagcaccaacaattttatggttggacttttcataaattgctttagaaacagacttaagttctgccattgttttaggtacctttaaaccatattttttaagtaaggtcttgttataagtcaagacttcaatagatttgttgaagggaataccatattgaacgccattaatttgcgcacccttcattaattcaggacgaatattagatttggctactgagccccaaccataagttgaattattaatgtatggagtcaaattgaccaacatcttattttgcgcagcttgataaagccaaccaggataagcttgagtcattgttggtaagttattaggattttgttgagtagaagtaattttcccttgtagctgagggtaattaccttgattttctagcttaactttgatgttaggattttctttttcaaatttattagtcaattgtttcaaagttttttgttgtgcaccattcattgcgtgccacatagtaatttctgtcttactatttttagcagatgtagtgctcttttgatttgaacaagctgctaaaaataatgctgcagtagttactgcaccaattgataaatattttgttaagcctttctttgtcatcgaattctcctcactaaaaataacattaataaaaatgaaatttaaaatatatttttattttaataagcacaatatcttgtatcacttattaactaatgcaagataatatactattggctaaaaaaagaaaattcaatccttgactttttgccagcatttataagcattgatatatcaacgactatttacttaataaaaatattagtagcaagagaaatttaattaaaaaacacattttattaaatacaatatcttgtgtatgataaatgtaagaatcaattaagctaaggcaaaataatagctattttctagcaaatagcttataattaataatgaagttaagaaaagaaaggtcgaattttatgaaaaaattagatactactaagcttactgatgaacaaattgaattttttaactcacacttaccatacatggcaactgtgaatgctaacggtgtgccacaagttggtcctaaggcttcacttaaggcaattgatgcttcaactattcaatatcttgaaaagactaagtcaactgcttatgaaaacttgaagaatggttcagtagcagctattgttgtcgctgatgttcctactcataaggcatttcgtgttttaggacatgctgaaattcatgaaggcgacgattacgctaagaagatcgtttcaggcactgatactcctgaagcattcgtagttaacattaagatcgaagaaatcgacgcttaattcaatattttatcgcaatgaggcatccctagcagggatgccttttttgttggtataatgatgagtagttaaagtgaaaatagatttttgaaaaaggtaaattgtgattactagtaaaaagaagccaattctttggttattatcagatacacatctaattgcagatagtttacatgatgatggtcttgcttttcagcatatgcgcaacactagtgcaggtaaagacttagattatcaggaaattgctttgaccgcgtttgtacgtaaagtaatccaagagaagcccactgcagtgataattactggtgatgtaacctttaatggcgctaaaatatcaggagaacgtttagctaatatttttaagccattaactaaaaataaaattgcattcttagttttaccaggaaatcatgatatttttgacggctgggctcgcaagtttaaaggtgatcatgaagattacaccctgcaaattagcccagctatttggaaagagatctttgctgattcttatcattatgctttacatgaagattctgattcactggcttatagcgttaatctgaataagcagtatcgactaatattggctgactcaaatatttatggcaagcaggaatcacaaactcatccgattactaacggtcgaatttcagaatctcaaatgaactggattgaaaaagaattaattgatgcgcagcaaaagcagcaacaagtgctattctttatgcatcataatctgtatcgccataataaagtaatctatcagggatatattcttgataatgcacttgcactgcaaggtttattacaaaaatataatgtaaaagcagtcttttctggccatatgcacgcacagaatattattggtccgtttgctaatcgaccaattgcggaggtagcaggagcttgtttttgtatgactaagcaggaatatggtcagctatatttagacgaagcggggatgcaatatcaggtgcattccttcaaaatggaatcgtggttaactgcagaagaaaagcaaaaagtgccaacagatttttcgcaatatttgaagcatttgttttttagtttggatgaaaagcaactaaatcagattgcgcaagctttaccagataaaaatgatgctaacgtggtcataaaatttgtagatcaattgaattggaacttttttgtaggtgaaagtaattattctgcagcccaaaagaaagaaattgttaattcacgagaatatcatttgattgcaaaatatttacctggttttaagcgctacgttgattcatttttacaggtagagcaaagtagccataaactgaagcttaagtggtagtgagattagttgctgtaaaacggaagcagattaccttagtctgggtgatctgctttttttattttttatacttaaataactgttattttataattcgattgataaaagctatattgctcttataatcaagtatttcgataagaaaagaaggcatgaaaaatagtattaatctatatgtaatgtttctttaattacatatctattaagaaatatgattaaactatttaaaaagagcactcattgtgctaaatttattttatttgaaagtgatcgcgtatataaaatatagtgttaaattgtcaaaataaattataatatagatatgctagaaagaagaaattatcaaaagaaaaacttaaaatcaattgaaactcaaaatcattattcggtcagaaaattatcagtgggtgttgtgtccgcaataattggcttctctgttttaggattaagtagcatctgatgaaactaaccaatcttctgaatcttcaattagtagttctgatgatccaagtgaacaaaaaggtcaggagacttcaactgatgaagaagtattcttaccggcactagcaaaggccacagagcttgagcgtcatgccaaagataaaaaaagaaagcctaccactcatcgagttggtctgcatagtgaagcatcaccagtaggattaaactctgttaaaactacagctgctcaaacggaaacttctattatgaaaaacgatacagtagaacaaattacaccgagatcatcctctaagtctgttttaccagcaacctgtaggcaagatagtgatctttcatggttagggttattactgtctggcttgagtttaagtggattatggactcgtaagaagaaaacaaaataaaatcgaaagagattgagacactgggtttcgatctctttcttgataggctcaatatcaaggaataaataactataactgctataatgatgatatgagtactaactgatcaaatcttaattgcatttattagatcgaaggttcattatgaaaatcaataaaaaacttatcttaatttctactgcgttattggctgtgtctccaattgccgcagcaccactaacttcaaacgttcaaacatcagttgccgcagctactaaaagcaatgcaactggctccttaaaagtcattgattcacatattatgttgtacaatagctcgggcaattatttggatcatatttctgcacctaagaaaggtagcacgattaaatattatggaaaaccattttttaagacggttgatccaggcgactacagtgctggtgagttatactatcctttacgcaagaatgtttatatttcttcagattatgtaacgccaatatctggccctgcttatttaacggcaatttttaatgccaatatttacaataagtctggcaaaaaagttggctttgttaaaaaaggtagcgtagtcaagtacgttggcaaacggaaaatcactagtggcaaagcaaaatactattatgaagctaccaaaaataagtatcgcatcccttacactaagattaagggcaaagattactactatttaggctctggtcgttacatcaaggtcgcaaatatcggttacgttgatggctatcgtctaatcactcaagccccaattactgtgaccgttaataagaacacttcaaccatcacaagatatgttaattcaacaggttggggtacagatcctaataatattgaattaaagaagggacaaaagatcacagtcgattatgctgggcaattcccacaacaattgaccgactttgatcatgatcactattcatactaccggatcaagggcactaattattgggtatcagaagatgatctgaatttgccacaagctttagagaatcattcagatcttgaattggccgattctaccaaagttgtcttggataaaaagattcttttgtacaatgttgacggtgaaaagacaagtcaagagctatctaaacagttctataccaatacggttgaagaaactgcaatgtatagcaaccacaaaattaatgaagcactctatctttgggtaccaagtgaaaagaaagctgaacttttctaccatacaacaggtgaagctaatgctaaaactaataagttagataatgaaggctatatcttggctagtaatgtcaaaaaggttgagggagtaaaacttacgccaatcaacacagccggtgaagcagaatcacaaagcaaggtggcaactaataagtcatcattgtctactgcaattgccactgcagaaaaggttcaaaagactgatcgctataaattagctgactatgataaaaagatacagttcttgacttatttgcaaaatgctaaaactgttgttggtgagacaaatgccagtgaagttgcggttagtcaagctgacaagtttttaactaatacgactaaagcacttgatggtaaaaagttgctcgttagacgaactgatcagttaactacttatgaggttcaaaaagtgatgaacctgatctacaactattaccagcctcaagttacaggtgagcttgacgttcaactttataacagcaaacgtaattggcaatatccaacaactcgtccagtatgggatgttaccaagaagagtccattttggtttggctattcttcagataccattagaaagcgcaaagtcgatattagcccattaatcactgatggcattactgttggcaagaaaaagaaattgcaaagtaatgcatacgtttatactgctaaaggtataaagacgaaaaagttactgaagaaggggaccccttacaaaattcaagcaattatgactattaaagggcaaaaaaatgtcaaaattgatgtaaataaatatgttaagtatggtaatttcgaagcatctaagctaaaagtggtcaaacattactacactgtgcaaactgtaacacctgtggtaaatgcccagggtaaaaaagttgccgaaatcaagtcaaagaataccaggacaaagaattatgtccaaacttatggcaccaagaggatcaaaggctatgattacattaagataggtagtaatcgctataccaatatgttgggatttgaatatgttttggcgaagtagggttcgattgattatttagtttatgttaaaagaagcactgtgttggtgcttctttttttgtacctacactacttgttattaaatggggcttcgaggtagaataaaactatatttactttaatattagaggaaaaacaatgtctaactttgaaacttcacaaaaagattatcaagaatacgcaaaattggcttccagcgctgaaagcttaatttactctgatcctagaagtagtttgacagtttttggtactttcggtgagcaattaactaaagaaatcatgcatttggatgatttaggtgattgggaattaaaccaaaaacaacgaattgaaaaaatggcatattctaagaatgaatatccacctactgttttgaatgctcttaatttgatcaggttaagacggaacaaggcaacgcatgacgatcattttattgctaccaaaaagattgcgcttgaaattgatcagagtgcttatttggtatggaaatggtttttagaagtttattctctggataaagttgcagattatgttgagccacaagatcaaaaagctttaattaaaactcaagaagataaaatcaaagctctcgaagaaaagataaagcaattacaacaaaatagggtgcaggaagtcataatttctcctgaagagcgtgaacgcagacgccagattaacgttcaatttgctaaaaaacatgagttaactgaagcagaaacacgtcagttaattgatcaacaattgcgagatgcgggctgggaagtagattcacaaaaattgaacaattggacgcagaaaactgaaccgcaaaaaggtcacaatatggcaattgctgaatgggttctacctaatggtcagcgagcagattatgcattattcaaaggtttggagttctacggaattgttgaggccaaaaagtgggaccaagatattgtagggcaaatggcacagcctaaggaatattctaaagaggtaccgtttagatcagattatcgtctagtttcaaatgaaatgggtgattacaaagttccattcatctatactgcaaatggtcgtccatatcttaaacaatatcaggaaaaatctggtatttggttctgggatgcacgtaatcataaagaaagcgcatatgctctagaggaatttcataagccagaagatttatcgttgaagctttctgctaaaaataaagaagaagcaaatcaagacttggtagatgatcaagattttcctgattttgcacatcgtgaatatcaaattgctgcaattcaagcgatggaaaatgccatcaaagatggaaaaaagcgtattctgcttgccatggcaacaggtactggtaaaactagaacggcaattgctttgatgtacagactacttaagcataagagagctagacgtattctttacctagttgaccgtaattcattgggaaagcagactgccaatgcaattaaagataataaaataggtacgatgtcaatttcttccatttatggattaaaggaattgagtgataaggcacctgaaatatcaacaaaaattcaaattgcaacggttcaggggatgatcaaacgcctatttttcagtgaagacagtgatgataagccatccgttggtcaatatgatttcattattgttgatgaagcccaccgtggttatgcagaagataaagagctcagcgataaagaatatcaattctatagtcaagaagattatgttagtcaatatagacgtgtagttgattattttgatgcgactgctattggaatgactgctacgccagctttacaaacgattgatatttttggcaaaccggtgtattcgtatagctaccaacaagctgtcctcgatggctggttagtggatcatgatgcaccagtaattattcaaactcaattgtctcaagaagggattcattttaaaaagggtgccgaagttagtctttttgatcaggatgaaaaaactatcaataaagaaaaattacctgataatatgaattttgatgtaaaagactttaataagagagttatcacacgtagctttaatgaagtagtttgtgatgaattagctcaaagatatcttgatccaaatgatccaaatttaggtaaaactttaatctttgcggcaactgatgaacacgctgatatggttgttgacttattgaaaaaagcattcaaaaaagtgagtaatcctgtagatgacgatgctatcgaaaaaattactggttcaattcggcatcctaatcaagaaattaaaaactttaagaatgaaaccaaccccaatattgcagtaactgtagatttactaactacgggaattgatgtaccgcaaattactagtattgtcttcttaagaagagttcagtcaagaatcctctatgagcaaatgttgggacgggcaaccagactttgtcccgaaattaataaatccaaatttacgatttatgatgccgtcggaatctatgaagcaatgaataaagtgacaaacatgaagcctgttgttaaaaatccaggacataatgttcactacttcttaaatcacaaggatgatttctttgagacaaatgaggattccgctcagtatcaagtagatatggctggtgccgttgagagaaaaattaaacgtttggatgatactaaacgtgatgagttccaacatctagctgagattaattcggttgatcaatgggcccgtgaattaagtaagttagataagtcccaatttttaaagcaatggcctaagtttgagcagttagatcacatcaaacctgtcaaacccaagcaaataatatcagacgcagtagacaaagtaattaatgtaagtcgaggttatgggcatggcaatcaaaaaccagcggattatattgaaaacttcaataaattcgttaaggaaaacgtcaatactattccagccttacaagttgtagctactagaccgaaggatttaacttttgatgaactcaaaaatattaaacttaagctagagcaaaatggctttaaagaaaatgatttgcaaagtgcatggaaaaacgttaaccatgttcagaccactgccgatattattagcttcattagacaagctgcggctggatctgagttggtggatcatgatgttagaattcataatgccatgcaaaaagtttatggtttagctgattggactattcctcaaaagaaatggttgaagagaattgagaaccaattaatttcatctactgtattggggccaaatgctgagaaagcctttgatgataactatttctttaaacgtcacgggggttataagcaaattaagaagatctttccagaaaatgctgatcagattatttacgtgttgaatgagaatttatatgtttaaaaatgccattactggtattttttgcttttaatcacgaaaagttgtgataaaaaaaggcgtgtgctaaacttaaattaacacggaggaatacaatatgttaatcgagttcactgttaaaaattatgcttcttttagagagcgcactaccttgtctgcagagacaggcaatagactacgtaaattgaaagaaactaatactttctcaagtaaaaatccatcattattaaaaagcttactgttatttggtccaaacggttcaggtaagtctcaattgattcaagctttacaaacaatggaaggaatagtaacacgtccaactcaagccgtaactgataagttaaattattatccttttttgtttgatgaaaagtccaagattgaagatacttactttgaagtgaagcttgagttaaaaaacaaaatttatgactattcatttagttacaatcgagagagcattaccagtgaagcattaaccttaattagtggtaacaaggaaaaagaaattttttctcgaaatggaaatgacattcaagtctctaacaagcttttggaagacagcattcctaagcttagagataattctttattcctatatttagcacaatctgaaaatgatgcagattgtattgctatctataagtggtttgttaatgatctgatttttattggcagcggctatccagtaaatattcctgacgaacttttaaatttgatggaagatgaatacctcaaaaaagaaatgatctcattcttaagttttgcggattttaatatctctgatattagaattagagaagtacctactaatccgttgaatccacaattacaaaagattgtagagaatttaaatattgattatcctaaaacaactaaagaactatatacggttcacaagatttatcatcaaaatgaagttattaattctggggaacttccattaacacaagagtctgttggtacacgtcgtttattttatatagtattagcaatgatgcttgctcaaatgaatggtaacgagaagacgattgtaatcgatgaatttgatgattcactgcatgttgaacttgcagctgctttagttcgtatttttaattcaacagaaaatttgaatcagtttattatcactactcatgatattcagctattagacagcgatttaagaattgatcaaatttatttattagacaaggattttcacggaattagtgatttgaaatcaatctttgactttgaagatgcacgtaataaaggtcgacatgatatttcgtttgctaagagatacttacaaggccgattcggtgcagttcctgtaatagatgtagatggtttgctagatgtattgcaaatgattcatgaaaaatatggggatgagcatgggaagaataagaaataagactaagtctaatccaattattggaattctgtgtgaaggtgaatctgaaaaacaatattttactatgcttaagcagaaatatcgtttagcaaatattaaagttaaaatagttgctgcagatttgtctggtaaaagtctagtagaaaaagcagttaagtttggcaaatataatcatttagataaaacttatgttgttttcgatagagatgagcattctaaagatgaattaaggaaatgcgctaaacttgctcgaaaaaatgatattactattatgttttcttcaatagactttgaaatttggattttaatgcattttgaaagtgtcactcgttcttatactagaaaagagctagtacagaaactgtctagatctgcctattttaatcaagattatagtcgctttaaaggtaatagttatcgagaatatatttttgataaagtgcaagatgcagtagatcacgccaataagttgtatcggaaaaagagtgactggattaatgatgatccatttactaatattcaaatatatctaccggaaatcttcaaaagagacaatttttaaaggagcaaaattaagtgaacaatcaagaaatcgttcaaaagttatggaatgaatgtaatattttgcgtgatgatggtgtcagttaccaagattacattactgaattaacttatatcttattcttaaaaatgagtaaggaacaaggtgaacaggatgatatcccccaaaaatatcaatgggataatcttgtttcaaaggaaggactagagttaagtaacttttatcgccaattattacttgatttaggtaatcctgaagtggttaatagtccaagaatcaattcaatttacgctgatgcttctacttcaattcacaaacctgctgacctggaaaaaataataaaagatattgacgcacttgattggtggtcagctcgtgacgaaggccttggtgatttgtatgaaggtctaatggagaaaaacgccagcgaagtcaaatctggagcaggtcagtattttaccccacgtgtgttgattaacatgatggttagaatgactcagcctaaaattggagatcgctgtaatgaccctgctgctggtacttttggctttatggtagcagctgacagatatttaaaagatcaaacagatgattattcaaccttgtccgcagataaagaagaatttcaagtaaaagaagctttttctggtatggaattagttgaaaccacgcaccgtttagccatgatgaatgagtatcttcatggcatggatggacgattggaactaggggattcattatcttcaaatggtaaatggatgaaagattttgatgtagttttaactaatccgccatttggtaccaagaagggtagtgacgacagtgtaagtcgtgacgacctaacttataagactagtaataaacaattgaacttcctgcagattatctacaattcacttaaacacaatggtaaagctagagcagccgtagttgtgccagataatgtattgtttgccgatggtgttggcgaagcaattagaaaagacttgctcaacaagtgcaacttgcacactatcttgagattgcctactgggattttctacgctcaaggtgtgcagaccaatgtattattctttactcgcggtgaaagtgacaaggataataccaaggaaacttggatttatgatatgcgtcatcagatgcggtcatttggtaagcgtaatccattaagtgacaaggattttgcggaatttgaaaaactattctgcgttgacgatcgctcaaagagaaaagaaacttgggataaagagaagaattctaacggtagatggcgcaagtttacgattgatgaaattttgaagcgtcctaatactagccttgatatttcttggatgaatgatgaagaagagcacgataaccgttcgttgaaagaaatcttagatgagatgaatgacaagtctaaggcaattagggatgcaattgcggaacttaataaggcgttagaaggaattgacgatgaagactaatactttagattttgatgcacaggctttaagagaaaaaatcttggatttggccatgcacggaaagctggtgccacaagatcctaatgatgaaccagctagtgtattgcttgagaagattaaagctgaaaaagagcagttgattaaggaaaagaaaattaagaaaagtaagccgcttgctccgattactgatgatgagaagccttttgatattcctgatagttgggaatgggttagattgggggatgtaggtttactaaaaaatggaaaaactcccaagaaagaagacataagtagtgataatatttatccatactttaaggttaaagatatgaataataataacttatatatggaaaacgtgaaaaattgggttggagaaaaatatagccgacaagtaatgcctaaaaatacaattatttttcctaaaaacggtggagctatattaaccgcaaaaaaaagaattttgtctcaagattcattggttgatcttaatactgggggattaataccatacaatgacttaaatcacaagttcatattctatctgtttttaagcttggacataaaagactttgtaaaaggatctgctgtaccaacaattaattcaaaaaagttgaaagaaactcttgttccacttccaccacttgaagagcaaagtcgaatcgctgctaaaatagcgcagctattcgctttgcttcgcaaagtcgaatcttctactcaacaatacgcaaaacttcagactttgctgaagtcgaaggtgctggatttggcaatgcgtggaaaattagtcgagcaagatccccatgatgaaccagctagtgttttgctagagaagattaaggctgagaagcggaagatgatcaaggaaaaggagatcaagaagagcaagccgttgcctccgatcactgatgaggaaaagccgtttgatattcctgatagttgggaatgggttagattggggaatattgcaaaaaggattactgatggtacgcataatcccccaccgaattcacatgaaggaaaacaagttatctctgcaataaacattaaaaaaggaaaaatagatttttctttatcaaatagatttgtttctgaagatcaatttttaaaagaggataaaagaacaaacatccgaaagggagatgtattactcactattgtaggctcgttaggtaatgctgcagttgttgatactgataaactttttacagctcaaagaagtgttgcggttattagtagtaatattttaagtaagtttctttattatgttttaatttcagcaatgtttaaaactcaaatttttgctaatgcgaaagggacaacccaaaaaggaatatatttgagtaaattaattaatttgaaattacctcttccaccattagcggagcagaatagaattgttgctaaaattgacaatttgtttatatactgaaacttgaaagctaagattaacgctccttccccgcgcctcttggctttttcttatcaaaaataaaaacgcaggctctctctgcgttatactttaagtgtcgacctaaaaagtaaaggagatcctgcgcaatgaacagtatagaacaaatcgacacagaaaatgatactaaatccttaatttcttcatttattaatctaattggtctagctaagttaactaaacaagtcaattttaagcgtaaatccaccgtttcattaaccatgattatctcttggctgatgtcagtacattttgctcggctttctttattcagagctaaggatgacaaacgtttttccgttagaactgctcgcaatgtacttaacgatggaagaatcaactggcaaaaactattatgcttgattgcagcccggctcattggctgcttaaaactatttatcgataaaagacgccgacttgcttttatcgttgacgatacgctgatggctcggtctttttctaaaaagaccgaattgctagctaaagtctatgaccatgacaagcatgagtattggaacggatatcgtggtttaactttaggctggagcgatggcaataccttcttgccggttaactttgccttgatgtcaaccaaaaccaagaaaaatatgattggagctgctcccattactgctgatgaacgttcaatttctggtaaaaggagaaatcaagctcagagaaagatgaatgatgtaactgtagagttgattagacaagccttacgattaggagtagaagctaaatacgtcttattcgattcttggttttcttctccaagaatgttttggattttaaagaagatcggtttagatggacttggcatgatcaagaagagttcaaagatttattacatttatcgccatcgccgctatagcgttaaagacttgtatgatcgtttggctgcttcaaacatccgtaaaaagaaacattatctttattcaagcatagttgaggctcaatatcatggacatagctttttattaaagctcgtctttgtctccaaccgtggaaacaagaacaagtatttggttttagctactactcagacaaagcttagccctgaagaaatcatccaactttatggtcgtagatggcaaattgaaacatattttaagacgtctaagcaatatcttgctttagataaatctcaagttcaaagctatgatggccaatgtggctatatcgcagttacagcaataacttatgatctattgacctggcaggaaagacaaaatacagatgataagacaatcggagatttattctatctaatgaacgaatccttacctgatattagattcgtagatgcattggtctacttaatttcagaattaaaagagcttaaacagaatagttttgaaaagatagatgaagtaatcaatgactttattaaccaactgccacgattcatacaaattgcactgaaacagatcatataaaaactaattacgtctaagaaagctcaatagtgacaggacttgagcttgattttggtgctttcaattttcagttatatattagaattaacttttaagagatgaatttatataatacgaggagattaagtatgcagttgtacagagataaagaaatagatatagagttatcgttacctgataaatataataaacaagataaaaagaaagcactaagtaaattttatagagataaaataaatccagatgatgataatgatcatgattttgtgtttttagaaaagcaacttcataagtttctcaaaagggctgttttgcgttttataagtaaagattatagtaatgttgtgctattagttggtgccggagcttcagttgtaactaatgagaatggaaatattaattcaaattatggaaagactatgcaagatatttcatggaatattttcaatcagctttatggaacaaataatttagaagaatatttagatgaaaaggatgctaagatctttttacctaaagatcaacaagaaaaatttgaaaaagttaattttgatgatgaaagtacatggttttcttttccattagaagaatatatttcaaatttaaatttatatattcaagacgcagagatgtctggtaaaaaagtcagaaatccaagtttatcacaagcaaaaaaattaaaaagatttattttactatcaatacttgattcagttgattataatttcgatagtacatctaaaatgccatttaagcatgataaagtgattttaaagttgcttaatttaattcattcggatagcagtaaattgatggttgcgactacaaattatgatttagcaattgaaaaatctctggaaaaagataacttcacaatatttgatggatttgaatttggaaataataaagaattcaatgatgatatgtatgagtgggttttgagtaaagaagttaacaatattaatactaaacaagttatctataaaaagcatgttatagatcttcttaaaattcatgggtctattaattggattgaaaaagaaaataaagttactaaatcgactgtggaagaggtaaaaagtacgattagagataacagtaatcatgtaaaaatgatttttccaagttctaataaatatgctcagagctatgaggaaccctattttgatctcatgtctcgatttcaaaataagttgcaccaacctaatacattattagttacttcgggttttagttttggtgataatcacataagtagaatgattataaacgcaattaagcataactcaagtttagattgtttgattactgattataatattcataattttgataaaaaaacagaacaagaagatgttaatgacaactggagtgatttagatgatttgagagatcgaggatataatattgcttttcttaaagcaacaatgtgtagttataattatgatttatcttattatgtgggataactatgagtttgatagataacttttttgatagttcagacaaaaatttgcatgtagacaaatgtgaatactatttaggtaaaatatctactgtatcttctatttttgctaatattcaaatagaaaacatgagtttattgaagtatcgcttcaatcaaagtgatgttttacgccctaatactattaattatcatgttttgattgatagtaatggcacaattttcgaaactgtcaaatcttttgtgtaaatagttctttctcgtaaattgattttttaattatttatttaatcaaagtaggattctaaggtgtcctgaacctgaccaaagcctttatgaattcgattgaaataacggtcattgtagctcattgcctgaatgccaataaaagcatcaagcgactgttcagttggaaactctgccttaggcttagctttgcgcttgatcacattgttaaatgattcaatcatgttagtcgaataaattgaagctctgatctgcttgggatagttataaaagaccagcagatcgggctcaatttccttcaaacctttgatgacattgctataagctttattccatctggcatagaatttgtgcaagacagctgcagcttctttttggcttgtctgttgatgtatctgcttgaattcgttcatgatcttttcgcggtcatccacccggactttagcacagatattgcgcatgacatgaaccaggcagcgttgaaaatgagctttaggataagtcctggccaaggctgttttcatgccaacaacaccatcagaaagaaagagttcaacttgcttcaagcctctggactccatgttttgaagcatatctgtccagacttcaatgttctcactaggagcaatgcagtagtcaatgacttccttatgtccattaggtttaatgccaatggcaatatatactgcttcacgctcaaacgtttctcggcgcaaaggaaggtatgtcgcatccaaatagacgcagaaaaacttgtcgcttagcttgcgtttgtggtaagcctcaacctttggaatcatctgcttggaaatatttgatacctgagctggactgtaatggctgctatacatcttttcaattagatcggctatttccctggtggtcacgcccttggagtaaagcttgataatcatgctttccaagacatctgagtgctgcttgtagtcaggcagcgtgtgctgatgaaattgaccgttgcgatcccgaggcacttgcacttcaattgggccaaattgcgtatcaactttgcggaaataagcaccatttctagagttgccagtattccagccatttctggcatagggatcatagcccagaaaggcagtcaattcagcttctagcaatttattaacagcctgttgtagctctttgcgcaataaatcatttattttgtctggattgaatagagcttgagcaaaatctttggtaaaatcattcatgaaggagttcttctttctgtatgtgtttttttgttcaaaccaatcatacgagaaaggaactcctttttctaatgtttaaagaaataaatttaaggaatcattcatccttacacaaactattttacagtctccaattttcttagggaaagtaataagttctaggattaataatactgataatattcataaggcagtaatagaaaataatgatgatattatttacccaaatattgaaattaaactaatggcaatgtacgataaaaatacgtttgtattgcccggagatctaacagtaggaattggtgataaggcatatatctgtaatgatgaagctattaagaaatatataaattcattagaaattaataaaagggataatcaaattgaattttcaagctttaatttaaatgaaaagaaagctattccattcaaaattagtgttgatggattatttaatcaccattttatgattgtaggagcaacgaattctggtaaatcaactagtgcattagcgattttagataaatatcaaaagctaaaaggaaaatttttgattatagatccaactggtgaatataaagatgcattttcaaaaaatgaggttaatttaaaaacaatagggaaaaatttattcttgaatactgctaatttgactgatgaacaatggatttctttatttaggccaaatgataattcccaagtgattgagcttttagaggcaataaaaaaattaaaatttgttcaatactataaaaagcatttaaataaggtaaatttaaccgaggcagagaatagatttataagaaatgatattcttgactgtgaaggggcaaatcaagaacagtacaagcatcttcagattcagtgggaatctgataaagtttttaatgaatcatttgatataaacaatttagataaacaaattgagaaagattctttaaaacttagttggaataaaggtataaaacaaggaacctaccagtttgattattttacatatggagctaattcttggctaatacgtaaagtaaaatatttgattaagacgtataatctaaaagagttatttttaaacgtagatagtaaaactcaagataaggattttggagaaacagataaaggtaaaaagatactcaaagaccttaataaagaaatgttagaatttcaaggtaatgacatatcattatatatacgtttaaatgattccaaattttcaattggattaggacaagtaattgtagactatataagtaatttcttattaaatcatgatatgacaaaacatccaactttattatttgttgatgaagttcacagatatgctttagaaaaagatgctcaagatgattttctttctcctctggctacgttagcacgagaaggaagaaaaaatggaatatttctatttttaactactcaaagccccaaagatgtgccaactatagtattaaatcagataggaacacttttaatgcatcggttaactggtgaatatgaaattaaagcaatcaataatttcctaaataaagacaaattagctcagttgtcgagtttaaagtcaggagaggcaatattgactagcgtaaatttgatgcaaccagtcaatcttaatataaaagcttctgggcgaacacattacagtaatacgcctaagttgataaagataaaaaatgattgactacaaaactttaaaacatagtgaaaatgggatgccaacttgggatgcatttttaggtcccatgctagaggtagcgagtactaaagaagaatgggtaggtagagagcttgataagctgttgtcacagagattaatttacctgaagaacttgttaatttaagatatccttctaaatatcatgatttagtagcaattagtcgagtagcttgggcgcttagtgatttaaaattagctggtttactaatctcaccaagaagaagtatttataaaattagtgatactgaaaaactgctattaaataaatatggtctaaacatcactcgtgaattagtacattctcaaccagcatatattgagcaccagaagaagtttcaagagaaaagcactactgatgaagaagtcttagaagagcagacttttgaattagccgaagaaaagaagaagaaggatgagtacgataagctaagctccgaacttaaagatgctaaggataaaaaagaagaacaagagaaggagcaaaaagaacaggcaaaagcagctgctaaaaaagctactcaaatagcaaaacaatcacggcaaaacgagtcagctcaatctagtcgttcaactgcaacacatcattctaatggtggcggcaatcatggagacctagatacagcagaaactggcaaaattgtcggtaacgtcaattctaagatttatcacgtaccaggacaagcaggctatcatatgaattccgcaaatgcggtttacttcaatagtgagcaggatgcaatcaatgctggttacagaaaggcaaaaaggtgatgaataagaagaaaattattacacttgtttcaagtacgttgtttttgtttggcggctatggtgcgattactaatcctagtctaagtcaaaatgtcatcgccaaggttaaaactatcatcaaatatgaccacagtgctgagaaaaagaccaagcaaattgcgcaggaaaacaagcaaactgaaaagaaaattgttagcctagacaaaaagattgctaaactgcgcaaagaactcaagaagtacactggcaaacacaatattgaatctgttagtgccgcaaaactggcaagtcttaactattctgggaaaaacatcattacagtaaataacaacgatcctagtttttctaagagtgacttgagtactaatcgcggagcatggcaagaatatggtaacctcgatggtttgaatcgggtaactgccgcaaacgcattgcttattcagtcgctgatgccaagcgctagacgcgaaccactacatgttgatcctactggttggcataataaacgagttgctggcggctggctctataatcgctgccatttgattggttatcagctaacaggacagaacaacaacattaaaaatttgatgacaggtacaaggcagctaaatgatcctgatatgttgcgctatgaggatcaggttgctgattatgtaaaagaaagtcgaagcaactacgtccgctaccgtgtgacaccggtctttcgtggcaatgaactattggctcgcggagttgaaatggaagggcagtcggttaactcaaatgcagttcatttcaatatttacattttcaacgtgcaagatggcgtaactttgaattatgctaatggtactagtcgagtagggtagtagaaatgagatacccttattgataagaagatgactgagattaatttctcggtcattttttattaatgatatttccttagaaacaataatattgattctattaaacaacgtttttcaattcgtaaaataacaatcggtgcagtttctgtactaattggattgacttttatgagttactctagtcaaacagtacatgctgatagtgttgatgcaaattcatctgatagtgctactaccagtgttataaaggaccaaactactacagagcaagttgcttccacaactaaaacttctaataatgtagatacaaatggtgccaataaaactgaagacactactagtattgtgaagacaaaatcgactaacaaagttgatctttcaaatactgatttaactactaagaacaattcaatcgatgataactcaaatgtcggatcatcaattgaaagtaagaacaagatagctactaatgaaaacaagcaggagagtacgacttctaccaataagcaagctactacagtagcttcaactagtaagacacaagctaacaccactcaaaatagtcagtacaacactgcagattgggatggaagtttagatcaaaattctcatcaatacactttaactaaatataagggtactggtaataaaaatatttacatccctaatacccaagattttatcaatgcaggaacaataactactgatgataaagtctatatcactaaagacttattagaaactatcaaagatgcaggtgcagttaacattactattgacagtgagggagataagaacaaagtttatgctaagggtgacatgaccgcagccttaatgaacagtgacactttaaagtctgctgatctaagtcatttagatgttagtgaagccactgcaattagatctatgtttcaaaatgacaagaatcttgaaaatgtaaacatcgctggctggaatatgggtcaattcagtgacgtgtcacaaatgtttagtggcgctgaaaagcttgtgaaagttgatctaagcgatactgtatacaaaaatgtggtaaacgcttggaacttttttgcacataataatgccttaactgatgttgatctaacaaatgcccgcaacattactagagaaatagttaatggatacgttcaagcaataaagaaccaaatgcaactgccattgatttaactactacaactttgaattccaatgtaactaatctgaaacttttattttctagtattccaaatgtaaaaagtattaacttaagtggttgggatacaagtcgtgttactaatatttatgcaacatttggtcatgataaaagtcttgaatctgtaaatattagtggttggaatttatctaatgctaaatcgattgctagtttgttcgatggcgatagtaatttatccaatattgacctaagcaatgtaaactttggtaataatattggtgataatggtgattccttcggccatgttggtaataaattaagtaacgtaaatttgactaatgctaaaggaattcccgaagcagtattgagagcatggggtcaagcagcgaaaaataccaaggctactgagctttcaatgagtacatttactgtttcaaccgacagttgatttagactttaatcttcacggtcaaaaacctggcatcgattcaagcaatataaaggttagagacgaaatagcagtagtaaagtaaataaatgtgatagaggattggacttatatttaattgctgtaagttcaaccctcttattttgattaaatctttgatacaatagacatgattaaataaatagggtgtgatctaaattctaaaatctaaacggcatttcatgtttctaggagttgcaggaattatctattattcttggctcttaatcgttctatttatcgcctttattttgggctatgaagggaacaaagcaattagtatacctggaatagtagttggtatcattttcttacttttagcagtttatacttggtccttttcttacttgcaaaagggtggagacaaaatattactcaagttgccatatcgttcaaaagtaaaaatcaatcaaatgactttgctttcaagttggcgtaattttcaagtttatcaactaaaaagtgattaccaaagctattctgttttaatgatgtctagaaagaagaataagcaataatgaaatcagatattgaaatcgcacaagaaaccaaagaattacctattaatgaaatagccgctaaggtaggcttgaaagaggaagacttagaaccttatggtcatgataaggctaagattacttggcaagccattaacaggactcgtgctagtaaaaagttaggtaaattagtattagtaacgtcaatttctcctactcccgctggggaaggtaagtcaacgattacaattggcttgggggatgcaattcacaatcagttgcaccagaatacgatgatcgccttgcgtgaaccttcgatgggacctgtttttggattaaaaggcggtgctacaggtggtgggaaagcacaaatcatccctatggaagatatcaacctacacttcacaggagatatgcatgctttaactgccgcaattgacacacttgcagctttagttgataactacatctaccaagacaatagcctaaatcttgatcctgaccgaattttacttaagcgtgggcttgatgttaatgaccgtgctttaagaaaaatcacggttggtcaaggctccaagtttaatggtgttgaacatcaagctagttttgccattactgtagccaacgaattgatggcgattctctgcttggcaactgatattaacgatttaaagagtagaatcggtgacatgctagttggttacactaaggatgatgaaccggtttatgttaaacagttaggattccaaggtgcaattgctgcactattgtctaatgcgctgaagcctaacttagtacagaccttggaacacacaccagcattagtgcacggggggccttttgctaatatcgcgcatggagccaattccgtcattgcgacaaacttggctttgcatttaagcgactatgtattaactgaggccggctttggtagtgatcttggtgggcaaaagttcatggactttgtctcaagacatctggacaagacgcccgatgctgcagtagttgtagcaactgttcgtgcattgaagtatcaagctttaggctcaactgatcacttagatgaagaaaacctagatgctttaaaaaaaggttttaaaaacctcgagcgtcatatgaacaacatgcgttcatacaatgtgccggtcatcgtgttaatcaatcgttttgcttcagatactgaccaagaacttgctttgcttaaacaattaattgaagaacaaggtattaatgctgaagtagttacttatcatggcgaaggttctaagggtggtgtagaagccgctcaagctgttgttgatttggctaactctggcaaggcagatttaactccaacttatgcagatgatgacgatgttaaagacaagattgagaaagtcgctaccaagatttatcatgcagctggagttgaatatagtgacaaggctgaaaagcaaattgcggaattaagaaagttaggtaaggcccaattaccagtaattattgccaagacccaatattcatttagcgacaacaagaacgaattgggtgctccaactgactttaagcttcatgtgaaagggattagtttaaaaaatggtgcgcattttatcgtggttaccacaggtcatgtgctagatatgccaggtttgcctaagcatcctgcggccctagatatcgatgttgataacaatggtaaaattagcggattattctaaaaagatatgcagtttttatatttaattatttcattagttgtggttcttgccgatcaaggacttaagaattatattgttgcccattatgctgtgggagaagtacaccagattattcctgggcttctttcctttaattatttgcaaaataatggtgcggcctggaacattttaactggtcaaatgtggcttttttacattatcagtattattgccattagtgtttgcttgtattttctttttaacaaaaagtacaagaataccttgtttgatgtgggtttagccctcatcttaggtggaattgttggtaattttattgatcgtttgcatttaaaatatgtagttgatatgcttcagcttgattttgttcacttcaacatttttaatattgcggattccgcaattactgttggagtaatccttgtgttcatttacttaatttttattgaaggtaaggaagaacaacatgactaaagaatattcacttgaagtaaaaaacgaaaagggacgtttagataagtttgtttcagaacaaattcctgatctatctcgaactagagttaaagaactggttaaagaccaaaatatcctagttaatggcaaagtcgaaaaagtatcttataagattcaggcgggagataaaatcgaagttaatattccagcggttaaaccgttagatgttatacccgaaaatattccacttgatatcgtgtatgaagacgatgatgtcattgtagttaacaagcctcaaggtatggtagtgcatcccgcaccaggtcatccagatcatactttagtaaatgcgttgttatatcacaccaaggccttagcacaatcaccagaaggatttcgtcctggaattgtccaccggattgataaagatacatctggtttattaatgatcgctaagaccgccaaggctcgtgaatcattagaagatcaattggctcataagactaacaaacgtctttattgggcaattgttcatggtaattttgcggaagaaaatggggtaattgatgcaccaattggtcgcaatccatatgaccgcaagaaaatggcggtagttgaaacaggcaaaaaagctattactcacttcaaggtgcttgagcagttcaaggattatagcttaattgagtgtcagcttgaaactggaagaacccatcaaattagagttcatcttgactatattggacatccggttgcaggagacccattatacggtccacgtaaaaccttgaaaggtcatggtcaatttttgcatgctaaagtattaggatttaaacatccaagtactggcgaatggctagagtttagtgtagaaccaccacaaatttttcaagaaacgttggctcaactagaacaaacaagtaagtgataatatgaaacggtatttgattttagaagatggcagttcatttccaggtgaaggaattggtgccagtattatttcaaccggtgaattagcaattcaaacggctaattttggctaccaagaagcattaacagatcctactaatgctggtaaaattttagtctttacttcaccaatgattggtaataacggtattaatgccattgattatgaaagtattgatcccgtagttaaagggattattgctaacgatattgcattaaatatttcagatagtgaaaattttgaagatttaagttcttttttgaaagaaaagaacatccctgcaattttcaaagttgacactcgtgctttagttcatcgcttaatggaagaaggtacaattaaggcttcgatcatggatactaatgacgagcatgcctttgatcagattaaagcactagttttacctaaaaataaatctgcgactgtttcaactaagaatgcatatgcatcccctaatgttggacgaactgtagctgtgctagatcttgggctaaagcactcaatgctgcgtgctttatctttacgaaaagtaaatacgacagttttaccatacagtgccagtccgattgatattgaaaacttacgtcctgaaggaatgattatttcaaatgggccaggaaaaccagaagaagtaattaatcagctaacgccagttttagatcatttttatggtaagtatccaattttaggaatcggattaggttttttaactttgagcgattatctcggctttgaactggttcaattaccacaagaatttgatggtattaattatccagtgattgaacaaaatagtaatgctatctggcaaacagcgatgaatattgaccaactagtgttgcctgatagtgtgaagatgaatatgaatcgtgaatactttgatctacacagtgaactgatggcgggcttctggaacagtaaggacaaattgatcgccactgcttttaatcctgaaggagcaccaggcactaatgatgcagatgaaatttttgattattttttacagatgatggggtagttatatgccattagaaaacgatttagataaagttttaattatcggatcaggccctactttaatcggtagtgtagcagaaatggatcttatggcaacagaagcaattgatgctttgacagaagaaggcattcaagttgtgctagtcaatcctaatccagctacaatttcaactgataaaaaacttggtgtaacagtctatcttgaaccgatgactctcgacttcctgaaaagaattctacggatggaagagccagatgcaattatgacagcttatggttcaactaatggtttaaaggttgcacataagttattacaagatggcgttttagaacaaatgggaattcagttactaacattgaattcgcgtgctctacaaatggggaatcaacagaaaaagacagagttgcttactaagctacatattgataccgggcaatcttgggaacttaatcagagtattcaggataatttagataatgcgctagaaagcattaacgacaaagtcacttttcccgtattagttactaagtacaaccgttttgtacacaacgaacatttgcaatttgcaaatcctaccgatttaatcagttactttaaagaagaaaagcaaaatgataattttacatggaagaattatcgcttaactgaagacttatctagttgggaagaagtaattgttgacgtaatccgtgataaggatggcaatttagcttttatcaattttgcgggatctattgaagctgtaggtattaattcaggtgactctgcagttgtgatgccatcattaaccctaaacaatgatcatattcaagagttaagaataaccgttagaaaaatcatgtctaatcttgatctcattggatttgctagttttcattttgcgattaaacaccatggaactcaaattcgatctaagcttttgacgattcgtccgcgtttgacgcgaagttctgtttgggctcaaagaattggaatgtatgatgtgggatatgtcgttagcaaagttgctatcggttatcgactgaatgagattaccgatcctctatctggacttaatgcctcaattgaacccaccttagatgcagtagcaattaaaatgccatattggtcatttgctgaatccggctataaccactatttgctaggaagtcgcatgcaagcaagtggagaagcaatgggtgtaggccgtaattttgaaactgcttttctgaaaggcttagatgcaactattaatttagaattgggttggcatgcttttataaaagaaaaagaaaaatccactgcagatattttgaatgatttggcacatcctgatgaattgcatttagttaaattattagccgcaattgatcaagatattccatattctgaattacaaaaagtaacacatttgcatccggtttattatcagaaattgcttcacattgtaagacttggcaaaaagttattacaagagaaggagcagccttcgcgtgatttgctgcaagaagctaaagtctatggattctttaacccattattagctaagattttacaaaaatcagttactgaagttcgctctttgattaataaaattgacttgcagccatcatatttgaagatcgacggctcagcaggtatatataaacctaatgtttgtgcttactacagtgcatatgatgttcaaaatgaagcacaagctttaaatgctgaaaaaaagatcttgattttgggcatgttgccgcttcaagtttcggttactagcgagtttgactatatgattgctcacgcggccgatactttacataagtatggctatgttactgtgcttctatcaaataatgacgaatcgatttcatcaaggtataagaatattgaccgagtttattttgattccattacagttgaaaatattctaactgttgctaaaagagaaaatatttctgatgtattagttcaattttctggcaaaagaatcagtgcattgagtaaagagttggaaaaatgtggtttgcacgttattgggcaaaaggcaaacgacgatccgcgggataagattactactttgcttgatcaacaatctactaccttaaagcgggtcccggcattaaataaaacaactgatacagaccaggttttcgcttttgcttctaaatatggttttccacttttaattggtggtatgaataaagaaaacaagcaaaaatctgcagttgtttatgatgttcctgcaatagagaaatatttagcagaaaatcaacttgatcaaataactatttctcgctttattgagggacacaaatatgaggtaacggctatctctgatggtaccaatgtaactttgcccggtataattgaacatctagagcaaacaggttcgcatgcctctgattcaattgcagtgattcagccgcaaaatttaaccgaagagcagcaaaaaaagattgagcaagagtcaattaaattaattaagcagctgaaaacaaaaggtatttttaatctgcactatttattcgttgataatgacctatatctattgcaaattaaaccatatgcaggtcataatgtagcatttttatcaaaatcactagataaggatatcactacttgtgctacagaagctttaattggcaaaaatttagcagagctaggatatcctaatggtctatggcaaaacagcgattttattcatattaaaatgccagtattttcatttcttaattattcaagtggtaatactttcgattcaaatatgaaatcctcaggttctgtaatgggtcgagatactcaactagctaaggctttatacaaaggatatgaagcaagtgatttacatattccaagttatggaacaatctttatttcagtcagagatgaagacaagaatcgcgtgacccaactagctcgccgatttgatcgcttgggtttcaaattaattgcgaccgaaggaacagctaatatgtttgcggaagctgggattactactggagtagtggagaaggttcataaagaccctagaaatctactagataaaattcgtcaacataagatcgtcatggttgttaatattactaatttgtctgatgcagctagcgaagatgcatcgcgcatcagagatgaagcgctgaatacacatattcctgttttctcaagtatcgaaacagcggaattgattttagacgttctagaatcattggctttaactactcaacctatttaataagcaaaacaaaatgcaaagtcgatatgactttgcatttatgagaatcattgaactaactagttcgatgatttttatttttcaatttttttattcataatttccttttcttcaggagttacttcaattgaattttgtccagtgtagattacaaatcctggtttagcaccattaggctttttcacacgcttgtcttgcacataatcaacttgtacgtgagcggaatttttagccttagaaaagtaagctgcaatctcagccgcttctttaatatcttgatcagtaggctgatcatcgcgtaagatcacatgtgagcctggcatattcttaacatgaaaccagtaatcagatttattagcttttttaagagtaagccaatcgttttgatagttgtttttaccaaccaatacgtgtttaccagatgaaagtttaaattcatttaaattgcgttcaatgattttcttcctacgcttatttttcttttgtttacgtaaatatccttgattaatcaattcatctgtaatttgatcaatatcctgtggatccgcattgtcaatagctgtttgaattgaatcaaagtaacgaatatcatccttagcaatacgaagctgttcattaatgtgcttaatagaatcacgtaactttttgtaacgagtaaaatacttttgcgcattacgagcaggggagagagcaggatctaatttaatctctaatggagcattattttcgtaatagttaggtaatgaaactttagtcattccaggttttacttgagccaaatttgcatttaaaatttcgcctttaattctatagccctctgaattttcagcaagatctaattgcttctcaagttttttaactttcttagttagtttattttgctcattcttaactacacgttcaacttgtcctgcacgctgcttaacccaatcacgtgttgcctgatattcataaaattcatctaagccagcattcagatctggattagagctttctttctctaaatctaaatgatagggcaaataacaaaaaatcttacgcttatttctaggtgtttttaaaataaaagcacgcggattgtcaaactgattaaaaaaggtcttaaaagatgaataagtgtaatcgtcttcaagatagcctaataattcagttcgatcatctttatctaagccatccattttttgagcaatttcattaggctggttttcactacttaattgtttaaattcactttctgatagagtcaacccatttaatcctggttttagtgggggcaactcatattttgcttttggcagtaaaacacgcgctctattttcatcaggattaattcgcttaagtaaatcaataatgtgattgtcttcttgattataaaggatgacattactatgacgtcccattaattctacagaaagcatgagcttgacttgatcaccaagttcatttcgattactaaaatgaaagttgacaattcgacctaagccaacttgctcaatcgattgcaaaactgaaccttctaagtattttcttaaaaccatgacaaaaataggtgctttatcaggatttgcaatgttttgtttagtcaaatacattcttggatattgtgcattggccgaaattaaaaattgataattctttctatcttttctaaaaattaagactagatcttgatcaaatggttgataaatttttgataagcgaccacctaccagagtagggactaagtcttttaataaactatggataaataatccatcaaatgccataaatatcacctcaaagttcgtgtaatattatatcaatttttagtcagattctaaaatgattatatttataagttatagctaatcataattgaaacctgcaatacagtagtaaatgtttcacgcgaggtctgctatatcattaagttgtatattacaacataaaaagtgcattgtattatacaatattactgataaattagccttttggtattatcaaatgccatattaaatgataaaatacaagtatatagtaatctacattggagaaaaaggactatacgaatggatgtattattttttagtacgatcgcagatcaagtgaaaaaagaaataaatcacaaatgcggcttaaatatttcacaaactcgaattttgctattttttgatgaaaacaaaaatcaagcattagcgatggggaagctggcagaagcgcttaatatttcattatcaaccttaagtcgtcaattgcagcaaaagaagactatgagctttattaatatcactagatcggaaaaagattcaagcaagattgtgaatctaagtgaagctggcgtgactaaagctaaagaactaaaaaaaactctgactaagattgagaatttattatttgtctattttgacagagatgctgctaatttatttattaagcaattaaatcaagtcgctgatacttctatgaccctagaaaaaatggaatagggtgcgtgataggtgccttttatgctataatttttctatgctaaattagatatgggaagggttaataaattgaaaattgcattagttactgacagtactagtgtcttaactgatcaagaagttaaaaataatgatattaatgtagttcctattcctgtcatcgtaggtgataaggaatattcagaaggcgttaatatcacttccacccagctttttgagatggagagacaaggtgctgcttttcctaaaacttcacagcccagcatggggcaaatgatagaattatgtaataaattacacggagaaggctatgaagctattatcgctatcactttgtccagtggtatctcaggcttttatcaaaatatggtaaatatggcacataacaatcctgaatataatttatatccatacgattctaagatgacagttagattgcaaggctacttggtgttagctgccgcaagaatgataaaaaatggtatggaaccagaggctatcttaaagaagttagatgagatacgtaagacaattgatgaattctttgtagtagatgatcttaaaaacttaagtcgtggtggtcgtttaagcaatgccggtgcttttattgggacaatgcttcaaatcaagcctttgttaacttttaatgatgaaggaaaaatcgttgcttttgataagatcagatcattaaagcgtgctgtttctaaggtagaaaaattaactttagagaagacagcaaatttgccttataaagataagctacgcttgtttgtatttcactcaaatgatttaaagcaagcggagcaaattaagcaatttgttaatgaaaactttccagataagccagttgatgtagctgaatttagtccagtaatcgctacacacttaggagagaaatcaattgcaattgcatggatggttgatattgataagctcgaattaaaataagaacaaatagccatagaccatagtacaaactatggtcttttttgtttaccctttttacgataatagatttgtaattaaaaattacagttgagatactagtgctgaatgttatagtaaaattgcgagactgtaaaatagtttgtgtaaggatgaatgattccttaaatttatttctttaaacattagaaaaaggagttcctttctcgtatgattggtttgaacaaaaaaacacatacagaaagaagaactccttcatgaatgattttaccaaagattttgctcaagctctattcaatccagacaaaataaatgatttattgcgcaaagagctacaacaggctgttaataaattgctagaagctgaattgactgcctttctgggctatgatccctatgccagaaatggctggaatactggcaactctagaaatggtgcttatttccgcaaagttgatacgcaatttggcccaattgaagtgcaagtgcctcgggatcgcaacggtcaatttcatcagcacacgctgcctgactacaagcagcactcagatgtcttggaaagcatgattatcaagctttactccaagggcgtgaccaccagggaaatagccgatctaattgaaaagatgtatggcagccattacagtccagctcaggtatcaaatatttccaagcagatgattccaaaggttgaggcttaccacaaacgcaagctaagcgacaagtttttctgcgtctatttggatgcgacataccttcctttgcgccgagaaacatttgagcgtgaagcagtctatattgccattggcatcaagcctaatgggcacaaggaggtcattgactactgcattgcgcctagcgagaacattgaagtctggacagatatgcttcaaaacatgaaatcccgaggcttgaagcaagttgagctctttctttctgatggtgttgttggcatgaaagcggccttgaccaggacttatcctaaagctcattttcaacgctgcttggttcatgtcatgcgcaatatctgtgctaaagtacgcgtcgacgatcgtgaaaagatcatgaacgaattcaaacaggtgcatcaacagacaaacaaagaagaagccacagctgtcctgcatgacttctataccaaatggggcaaggtttacagccatgttatcagaagcttgaaagacatagaaccagatctgctggtcttttataactatcccaagcagatcagagcttcaatttattcgactaacatgattgaatcatttaacaatgtgatcaagcgcaaagctaagcctaaggcagagtttccaactgaacagtcgcttgatgcttttattggcattcaggcaatgagctacaatgaccgttatttcaatcgaattcataaaggctttggtcaggttcaggacaccttagaatcctactttgattaaataaataattaaaaaatcaatttacgagaaagaactatttacacaaaagatttgacagtttcaaaattgctatagtaggcaatagtaatatggttatcataaaatataggaattaatttaataactgttttactatagtatatattttaatgttctttttatgttacaatcatttttaaatcaaattatagaaattcgaggaaatgcatatgtctgcaagcatacttattaagccattagttacaatcagcgttaaattaaacataaggaaattacatcaaattgaaaaatatcaacaataatcaaaacttaaactttactcaagttaaagatatcttagctcaacaggcaattactattgctgccaaagaacaattaagttccgtccaaccaagtagcaatttacataaagtagaacaactgcttaatgaaacagaagaagccgtgaagattttgaaattacggcagcacattccttttgccagttctgaggatatcgagcatttaattactaaagctgaaaaaggactaatcttaactcctgatgatctagaaaaagtagcagaatttttacgagtaaatcgcctactacaacgctttttagccagacatgagcagctagcaccattactcaatgcatatgtccaagacatgacgctattgccagacattgaagatgctatttatactactattgaacatggtcaagtacgcgatgaggcagatcgtgaactagcaaaaatgtgccgcgacttaaagaaatctgttactgaactcaaaactgcattaaatcattttttgactagtaaacctaatcaaaaaatgattagagacgcaatgatcgttgaaaaagagggctacgctaccattccaattaaagcaaactacaaaaatcaattgtcagggactattgtggctgtttctaatggtggacaaaccgtctactttcaacctgctaaggttgttcgtctaaatcagcaaataaccaatttaaaggcacaaatacgtaatctagaactagcaatcttaggtgctttaactgcaaaaatatacgacgtgaaggatgatattaagcgtaacattgaactaatcactttactagatatgatttttgctaggggaaagtttgcacaaaaatataattgtattaggcctaaaattaatcgtgaaaattctcttgttttacgtgcagtgcggcatcccttgatcattaatcctgttccgttaaccttagaattaacccaagaaaatagtgttctaatgattacaggaccaaatgctggtggtaaaaccgtcgcgcttaaaactactggcttgatgattttaatgaccgaactaggtctgtttttaccaagcgataaaccatgtgatattccattaatggatgacgtttttactttaataggtgatcaccaggacctagataattctctgagtactttttcagccgaaatgaaagatattgccatgattaccaaatatgctcaattccatagtttagtattattagatgaattagggacagggacagatccaaatgaaggaagcgcactcgctattggtattctacaagagttgtatttacgtggctgtttaatcatggccacaacacactacagctctattaaggattttgctaagcagcatgatggttttatcacagctgcaatggattttgacttaaaaaatctgcaacctacttataagttaaagataggaagtattggtaatagtcgagcactatggatcgccaaaaaatcaggtattccagaaaatgttttgcatcaagcagaagccatattagcgggcaataatttacctttatctttaaaaaaacgtttcgttcaccagcggaaaaacaaaagcaacctggttgttaaaaaagaatttcataaaggtgatattgtatatgctaccaatttaaaagaagaaggaatcttttataaatatcttcctacccaaaatgcagcaaagatatttgtgacaaaagaatttgtagaagtaccactcagacgtttacaattaagacgactagctaaagacttgtacccaaaaggatataacttagatttactctttgttaaagactggcaagattataagtttaatcgtgatctagatcgtggctccaaaaaagcttacaagaaattgaaacattaataaaaaacgagtttggaattgaatagccaaactcgtttttgcatttaatttgattaatcgtgatttttttttgagatctcattgagagccgcacgctgttttttctgatcaacatgagtatatagatcggtggctgaagtgcctttttgacctagctgttgtgctacaagcacttgatctttagttacttcatagagctcagaagcaaccgtatgacgtaacttatgtggggtaaggggatgaccaaaagctgcagaatacttattgatcattttttcaattgcattagttgtaattcgccgcgtttgaccatgccattgagttaaaaagaatgccacttgcttactatctgcatgatagcgttcattacgaatacctttatatcgcttgatataaggaagtgtccattctgcaattggtacactatctttttgtccgccttttctagttacatctagtacagcatccttaaggtttaaatcactcaaatcaacgccagcacattcagacacccgaatgccggtacctaagattaatgcagcaattgccatgtcacgttctttgttttgcttaaaaccaatctttgcttgcttattacaatggttaatatagtcctgatcaataaaagtcaaaaattcaaattttaacttaccagtgtacatgtggctttcaagtacatgagcccgataattaagtgtttgcgtatcatttaaagaattaattttaagcattacattccgttcaaaatatggctcaccatgattattgtcggcagtaatggttaaaaacttaaatagggagcgtaaagcattaattgagcgattaatcgtagtgggggagtttagtcggccttgcttattacgggtatgtcctaaataatcaatatacagcattatgtcattgcgacgtaagttggctaatgtatccgtagtaacatgagcattatctgaagcagaagagatattttcttgacgtagccaatcgaagaagcgtcgaatttcagttaagtactggtaagtagtagttaatgaatgattagtaccaagattaaattgcttaacaaaatcaggcaatttatttacttcaatttggatcaattctaggtatttagcagtttccatatctactccttttgcgaactaatgtttatattatatcatacaaatacgttaatcataaaaaaatcacctattctcaggaataggtgataaaaaacagtctaatttaaaattactgcgctcattcgaacgtgaatatctatagtactaacgtagaaaaatgattgcaactaaatttaacttagataatcatgtcactataactagaataccagcaacgcttatagaaaactcttagcattctaattatagcaacagtgattgctcgtcagtaagtaagggcaaattacatttagtaattcaaacattacttacaaacatatgttgtttgtatggtacaacacttttcaatcgtttattttatgctctttattgctaatgttcaagtaaaatataacattttttataaagaatcgaaaaaagcttattttccttgtttagtcgtattttttggctaaaaattgtacaatagatgaaaatacattatgtgagatgaggaaaaagtatgacagaagaaattagtgtaaacttccaagctaaaaaccctagtggtatcaaattactgaatcgtctatatgatggtcacttagtgttaaacgacattggcgttcgtttagatgaacaacttaataatgaagatgaagaattgactgtaccaactcaagcagatgtagataacttgagtgagacttttggtaaaactgtcacagttttcagtgatattgccgatgcatatggggatgtaaataattttgcgaaaaactttggtggtaccactaagatttttgctcaaaagttaattactgaactagtagatttcaataatggtattgcggacattggagattccgaaggcggtttagaaaactacgataacgataagcttaatgactggattaatcaagtaatgagcgacatcgttgaaactaatgaagcatttaatgcattaattgatgataaataataaaaagtgtcagtccttaaaatgaggattgacactttttatagttaattgctttttaaactggacattggataaactgtgtaatcagcacggtaaacaaatagacgatgaccatcaatcacaaattgagttgcattcttcatatcactcttatgaattgagacgtgatttccaataaagacagcaatcggcattcctaattggcttctaatcattactactcttgagctaccattccaatcgtttttaaaattctgatacattgtatttaacagaggaacagaacgattttgatcgtcgatcttaacttttttgttaaatgcatcctcgtagtttttcagtccttcataggcaatcatagtagaaccaacgtgaatcattcgattattgccatagtcaacatcaattacgctagaatgttcagtgccattactacttttctgtgacatctttttatcagtatgaatattaactgacttagctttgatctggtcgatcttttgtccattagaatcatacgttgatactgttaagggcaatgccccaatcttagagcgcatagataattcccagttttgaaaatcactacaaccagtcagagaaagcaataatactcccagacctaagaataaagctaacttctttttaaatttcatccttatcttatcctcgtttctatataatgccttaattttaacatggataaaaaagggatgcagataaataaattggaaatgatttgtcagttcatttacgttttagggatgcatcaaaaaagcagcaaatatttgctgctaaaaataaattagaacttgtctgctttgacgtaagcatttttaccaattcgatagtaagcttcattattgatgtaatgtttagggccataagtcttgatcggtgaaccggattttttagtagaccattttgtattaatggtgccatcatttttatacactttagcatcagctttaaagacgcgtgaattgcctagtacgttacttgccatcacatacttgtcttcaccgacacgaatcattgatttgcctttaattctcaccttattgtcataataagcaatagagctgtaagcattataaaaatcatttgtccggttgctatttttgtcataaacatatgacttgtacataactgtagctgttttcttggtattggaagccttaggagcctgtgaaactgccgcgttacctgcgattgataatggcaagactgtaatattgccatcagtattcattccgcgccaattatctgtgaactgccagattgcgacaccatccattgaagggaagtatttaaagttgggttggtctactcggcctgaaatcgcatatgcggctacccagagtgaattaggatacttgttcacgatagatggagtattaatattgttttgcaaaacggaagaactagcatagagaagtggttgatagccagccgccttaatttgatccataaaggcaataatagccttagctgtcacatttttaccattagtaatgatattgccctgaccagtttcataatcgcaggctaagtatgagccagctggtaatcccaacgccttagcagaagaaattgcgtattgcgcttcgcgcttagcggccgatgaacttgaactaaaagttgcaaaatgataagccatcggcatcatatcattagcaatagcagatttaatctgattggctgccttagggttgcgataactggttccctcactaactttaacgattgcaaattgagaaccagccttggcatgagcagttaaatctgcgctttggtagctggcaacatcaattccaagggctttagcaacaactgatgttgatgaagcttgcacaatgctctctgagtcagagaaacgagtcatttgagataaaagtgtgacacctgcattcgttaacatagttgcacatgctaatttaataattgatttccttttaaacaatttatgtcctccatacttagtggagagaatcttatctatatctctcacataatttatactttatagactacagatatagttctcaaaaggcaatagatgagatcatttattaatatatcagtaatcaaaccgaaaaaaattgaaatcaaattgagatatacaatagacaaaaaataaagaattagtcgtggcaagaaatatgaaactgtcaaatcttttgtgtaaatagatttttctcgtagattgattttttaatcttttatttaatcaaagtaggattctaaggtatcctgaacctgaccgaagcctttgtggattcgattgaaatagcgttcgttgtagctcattgcttgaatgccaataaaagtatcaagcgactgttcatttggaaactctgctttaggtttagctttacgcttgataacgttgttaaaggattcgatcatattggtggagtaaattgaagccctgatctgcttaggatagctgtaaaagaccagcagatcaggctcaatctctttgagatctctgatgacatggttgtacgctctgttccacttgtcatagaaggcgtgcaagactttgatcgcagcttctttatttggctgttgatggatttgcttgaattcattcatgatcttttcacgatcgtcgacgcgtactttagcgcagatattgcgcatgacatgaaccaaacagcgttgaaaatgagctttaggataagtcctggccaaggctgttttcatgccaacaacaccatcagaaagaaaaagctcaacttgctttaagcctcgggatttcatgttttgaagcatatctgtccagacttcaatgttctcgctaggcgcaatgcagtagtcaatgacctccttgtgcccattaggcttgatgccaatggcaatatagactgcttcacgctcaaatgtttctcggcgcaaaggaaggtatgtcgcatccaaatagacgcagaaaaacttgtcgcttagcttgcgtttgtggtaagcctcaacctttggaatcatctgcttggaaatatttgatacctgagctggactgtaatggctgccatacatcttttcaattagatcggctatttccctggtggtcacgcccttggagtaaagcttgataatcatgctttccaagatatccgagtgctgcttgtagccaggcagcgtgtgctgatgaaattgaccgttgcgatcccgaggcacttgcacttcaattgggccaaattgcgtatcaactttgcggaaataagcaccatttctagagttgccagtattccagccatttctggcatagggatcatagcccagaaaggcagtcaattcagcttctaacaagttattaacagcctgttgtagctctttgcgcaataaatcatttattttgtctggattgaatagagcttgagcaaaatctttggtaaaatcattcatgaaggagttcttctttctgtatgtgttttttgttcaaaccaatcatacgagaaaggaactcctttttctaatgtttaaagaaataaatttaaggaatcattcatccttacacaaactattttacagtctcaaaataaagatagttaaagaaagcgctttgtttaatcagaaatgtgataagatattttgcaagaaagcaaatgtgatcaaaatgctacattggatttgggtattaattgttggtggagtaatcggcttaattgcaggtgctttaactggacatggtaagtcaatgaactggattgctaatattttagcaggattggttggatcttcactaggccaagcccttttaggggaatggggaccgaaggttgcggacatggcaattgtaccgtcaattttaggtgcagttatcttggtaatcgtcgttgccttcattatgaataaaattagacctgcaacagattgagtttattcagatttttattctagctagataagcaaagagcctgattggacgaattatgtctgatttcggctcttttttcgtcttccctggtcagcagaggaggggagatagaggtataataatgaattaaaatgttgcttgtttgtataaagattgagtaaccacgataaattaattcattaaaaagaaatcttagagtgattctcagcattttttgaagattgaaactttatttagatgtcttattcatgtaaaaacacagatttaagtagcgacttgagtcatgagtttagtagaattatcatttttaccgcttgattatttatttaagaaatttcaatatgtgtattattgcagcaaatcttaaaaatagggaataagaataaatataaaagcacttaataccgatttgtatgtagcaaaaagagcaaagaatttataaaatatttttttacgaatttaaaatgaaatacaaaacgttaaaacaataaaaataacaaaagcacaaatttaccaaaattaggcttttgcgagataggtttatctagcgatcattaaaatttttgttttaaagaaagctatagcataaaaataaaaaatggctttatagatataaaggcaaaactagcaaatattactcaactattttcattgtttttaattagaattactttaccataattgtttcaaaatacttctctttgaaggttgttttattgattattgtcagcatattattcaattcagacttttagccataaaatatacagataactaatcatctaaaaaattatttcaagaatatctaggataccattgatttactcttagccataaaagtaattttatctagcttgattaacttgatgaaaaactataattccaaccatcaataaaaccattacttttaaaaactggttcatacaaatgaacaactaactattaaactataaaactattgatcaaaataaatgaacttggtcatagaattgcgatctcagcatgtaaaaatttattgagagttgattttcttatcatagtcagagtaaatgaagtaaaaacaaaaattaaaaaagcaaaattcatttttgaaaaaataaataacctgaattcggaaactgtcaaatcttttgtgtaaatagatctttctcgtaaattgattttttaattatttatttaatcaaagtaggattctaaggtgtcctgaacctgaccaaagcctttatgatttcgattgaaataacggtcattgtagctcattgcctgaatgccaataaaagcatcaagcgactgttcagttggaaactctgccttaggcttagctttgcgcttgatcacattgttaaatgattcaatcatgttagtcgaataaattgaagctctgatctgcttgggatagttataaaagaccagcagatctggttctatgtctttcaagcttctgataacatggctgtaaaccttgccccatttggtatagaagtcatgcaggacagctgtggcttcttctttgtttgtctgttgatgcacctgtttgaattcgttcatgatcttttcacgatcgtcgacgcgtactttagcgcagatattgcgcatgacatgaaccaaacagcgttgaaaatgagctttaggataagtcctggccaaggctgttttcatgccaacaacaccatcagaaagaaaaagctcaacttgctttaagcctcgggatttcatgttttgaagcatatctgtccagacttcaatgttctcgctaggcgcaatgcagtagtcaatgacctccttgtgcccattaggcttgatgccaatgggcaatatagactgcttcacgctcaaatgtttctcggcgcaaaggaaggtatgtcgcatccaaatagacgcagaaaaacttgtcgcttagcttgcgtttgtggtaagcctcaacctttggaatcatctgcttggaaatatttgatacctgagctggactgtaatggctgccatacatcttttcaattagatcggctatttccctggtggtcacgcccttggagtaaagcttgataatcatgctttccaagatatccgagtgctgcttgtagccaggcagcgtgtgctgatgaaattgaccgttgcgatcccgaggcacttgcacttcaattgggccaaattgcgtatcaactttgcggaaataagcaccatttctagagttgccagtattccagccatttctggcatagggatcatagcccagaaaggcagtcaattcagcttctagcaagttattaacagcctgttgtagctctttgcgcaataaatcatttattttgtctggattgaatagagcttgagcaaaatctttggtaaaatcattcatgaaggagttcttctttctgtatgtgtttttttgttcaaaccaatcatacgagaaaggaactcctttttctaatgtttaaagaaataaatttaaggaatcattcatccttacacaaactattttacagtctctgaattcgagttaacaaatccaaaataagacttatttgctgaaacaattaaattaattatgacttctattattaaattgattgtttttcaatctgactttacataatattaattatacgcacacttataaaattattatttttcagattggtcgctttcttctcactcacaacctcttcaaaaaaacacttgccaattatgacaagtgcttttaaaatcattttgaaaaatcaatttttttatttcgtctcaatgcaatgatataaactaaattaatcgtcgttaaaaaaatgactgcaatccaaatagtttttaataccaataatttttgcagtaaagctgaaattattgctccaactgcaaatgcaattgttaacatcatataattaacggcagctgtatgtttacttttgtcttcaccaaaaaaaaatgcactccatgcaacaaccgatttttttaaatttccagttgtaaatgcattgttataacccatgccttcaattttgctgaaagatgcgttttgaatagccaatccaaacgcaatagcaggcacaatataataattaggaacacttttaggcaaaaagcccactacaatacaaatcgctaaaattggaaataagcaaaatactctccaatagtgacttttcacatatttatgaaaaagtcctactaatagcaatcctaaagaaaaagcaataaacgtactagctcgattaatcattccaggaacattatgatcagctaatgctgaactaaaaaagataacgtttcctgtttgtccagcggaaagcgtatgtcctctctggatatatgtatatgcatcaataaatcccccacaaaaagttaacgcacacgctaattgtcgtgactctgcaggccgattactatttaaaacctcttttaaactcatcaaatccccaatctatttttatatccttgtatacattataagcttaaaaacttaataattagtatatttttttagcttttatttcatttctattttaacaataaaagtattcaatttaagactatactataaactgtgagactgtaaaatagtttgtgtaaggatgaatgattccttaaatttatttctttaaacattagaaaaaggagttcctttctcgtatgattggtttgaacaaaaaaacacatacagaaagaagaactccttcatgaatgattttaccaaagattttgctcaagctctattcaatccagacaaaataaatgatttattgcgcaaagagctacaacaggctgttaataacttgttagaagctgaattgactgcctttctgggctatgatccctatgccagaaatggctggaatactggcaactctagaaatggtgcttatttccgcaaagttgatacgcaatttggcccaattgaagtgcaagtgccccgggatcgcaacggtcaatttcatcagcacacgctgcctgactacaagcagcactcggatatcttggaaagcatgattatcaagctttactccaagggcgtgaccaccagggaaatagccgatctaattgaaaagatgtatggcagccattacagtccagctcaggtatcaaatatttccaagcagatgattccaaatgttgaggcttaccacaaacgcaagctaagcgacaagtttttctgcgtctatttggatgcgacataccttcctttgcgccgagaaacatttgagcgtgaagcagtctatattgccattggcatcaagcctaatgggcacaaggaggtcattgactactgcattgcacctagcgagaacattgaagtctggacagatatgcttcaaaacatgaaatcccgaggcttaaagcaagttgagctttttctttctgatggtgttgttggcatgaaaacagccttagccaggacttatcctaaagctcattttcaacgctgtttggttcatgtcatgcgcaatatctgcgctaaagtacgcgtcgacgatcgtgaaaagatcatgaacgaattcaaacaggtgcatcaacagacaaacaaagaagaagccacagctgtcctgcatgacttctataccaaatggggcaaggtttacagccatgttatcagaagcttgaaagacatagaaccagatctgctggtcttttataactatcccaagcagatcagagcttcaatttattcgactaacatgattgaatcatttaacaatgtgatcaagcgcaaagctaagcctaaggcagagtttccaactgaacagtcgcttgatgcttttattggcattcaggcaatgagctacaatgaccgttatttcaatcgaaatcataaaggctttggtcaggttcaggacaccttagaatcctactttgattaaataaataattaaaaaatcaatttacgagaaagaactatttacacaaaagatttgacagtttctaaactgtagtgcctaatagcactgattacgctaaaaatgtacatttataaacaaatataatttcttattatttaatataagtgtatgttgagaatattaaaatagtctattcattttttacataattttatataggctataatagactataagttacttgaaaggatcgaatgcttgtgaatattaatttaggagaagaaatttctcgtagaagacgtgaacagaaactaacacaggaagatttggctgagctaagtgatctttctgtaaattttatttcacgtgtggaaaggactaaggaccaaaacattagtattcagaagcttgattctattgccaaagctttgaatactactacacccgatatcattaacaatgcctatcgtgctaaaaaaatcaagcctgaaaaaattcatgataacaatacacccgttttcatgaaaaaagttattaacgaattaagaaaattaccagaacctaaggctgaacgcgtatgtaagtctttgatcacccttctaaaagaaatgaataattaacaaaaacgtgctgtttattccgaaaaaacagcacgtttttgttagtcatcaaactttgatccttggacttggatcgaatcaatagttatatcttctagtggtttatccattttatcttttttcgacttagcaattttatcaactacatccatgcctgtaattacttgtccaaagaccgtatgacgaccgtcaagccatggagttccgccttgcttataagcatgaataatttcctttggatagcctgcgggttccatctgttttatgtaacgcttaggcatattcttgttttgaacgataaaaaattgactaccattagtgttagggcctgaattagccatcgataatgctccgcgaatattaaaaagttctcgtgaaagttcatcttcaaatggatgcccccaaatgctttcaccaccagtgacatttccttcaggatctccaccttgaatcataaaatcgctaattacgcggtgaaaaatagtaccatcataatagcctttttgagctaaacgaataaaattttcaaccgtcattggggcttgttctggaaaaagttgaatttttatttcaccttgattggttttcaatacagctgttggtccctgttgattttctaaatttaattgtgggtatttcaatatttttctcctaaaatcagttttaatttttaggtaaaaaataagaggcggttaaccctacctcctattttttacatcattacttttaagcattaaaagcatcagtaagaggtggaacaacctgcttcttacgtgatactacaccaggtaattcaacttctgaatcactaagttgcttattaaatgctttttcgaataatgacttagtctcatcagagccaacaactaaagcttctgaatctgagtcaagaatgttagtaattaaaagcataaacatatcatagccattatccttagatgaagcatccattgcctttaaaaaggcttccttacgttctaacgcttcaggtaagtcaacaacattgatttgtgcaacacggacgttgtgaccatttaattcaaagctcttggcatctaaatcaatcaattcttcttctgacttgtcactgatgttagtaccagccttaagcattgctaagccgtattccttgtaatctacgccagcaatcttagccaatgcttctacagcctttttatccttatctgtagtagttggtgatttaagaagtaaagtatctgaaataatagctgaaagcattaaaccagcgtagttttctggaatttcaatgccaaattcattgaacattctccaaacaatggttgaagtacagcctacaggttctgcacggtaatataatggatcagcggtattaaaattcattattctatggtgatccacaacatgagtaaccttaactttgtcaatatctgaaacactttgttgtggttcattgtggtcaaccaacataacagatttaacttctggagcagcttctttaattacacgaggtgctttaaagcagaattttttaagagcatatgcagtttcatcattaggctcacccaaggcaacggcttcagtgttgtaacctaacttgttttgcaaatatgaaaatgcaatagcagtgccaattgcatcagtatctggattttggtgtccaaaaacaaattctttttccattaaataaattgcctctttttctaattattttatttaatttcttcacttaatagtttactaaaattatggttcctatccaagttattgtctaagaaaatctgtaattccgttagtaatttcttcatcctaggaacatctaattttcctctacgataaacacaagcagtcgtaaactcaggcatatttttaatataaacaggagtcaaattaatctcatccttatgcgcctcatagtaagtctgatctacataagtatcaagatcagtattttctgcaattttgatcatttccttagtagatgcaattttaaacggagtaacgagatcaatctttttactaaagttaagtcgcattaatcttgataagtagtaattctccggatatgcaacccactttctgttgccaaaacgagtaacagaatatgtccctcctgcttccacattatccttgtgagtcagtacaacaatatgctcagggcaaatatcacgatgattgtattgatgacggaaattagctcctgttttattagtagtatctggcatatacataatcgccatatcaatcatattggaatcaagtctgtgccatagctctttgcggtcaaagtaatcaacagtaaaagttacttctggatactttttattgaagtaacgtaaaaattggtagaaaagatcaacatgtacggactctagaataccaattgaaatattgcctttatctgactgggtatattcttgaatgtcactaataacaccattaatggtatttagcaactctatcgctgctgcttccatttctttaccagcttcggttaggtataacttcttccccatttgtccaaataatggagcaccaatagcgcgttccaatttttttacttgctgagttaaagccggttgggtaatacctaaaatttgtgcagcttgggtataattcatcgtctcaatcaattgtaaaaaataacgcaatgatttagccgataaaatagtatcacttttagacataacgattatctctttcctaaaatattattttacgataagccatgtcccataacactgctattatctatccaaaacaaaacagtgtcaaaacatatgtcttaacactgtttttaaagattaatatattgttttagttaaactcaaatcttaattttgactactaatgggtcttcccaattcaatacttacaggcgtcccatcaacagtagtatcaataacaaatgagccgttagaataacgatcgcctaatggataatccgtagttttaatatttacatgacggtcactagaagtagtgacatgtaacaaatgatcttgagcatatggcattagagcaacaattctatgcggtttattcttcaattcccgcagtactagtacccctcgcttggctctagaaactttattaactagtttaagtttgaattgcttaaatgccccacgttgagtaattagcccaacatgcattaaatcaacatacttagaatcaactaggacataatttacgatataatcgtcatctttcaagttagcagatttaacacctactgctttagctcctgaagttggtatctcgctaacatcatatctaattgcataggcgcgatgagtaaataatgtgatttccttatgattatctgatttgatcaaatctaccccaactacataactatccttgccctttaacttgatagctgtcattgcacgtgacttataagttctcgtcggctgtaagttagctaactccaattgtttgatataaccgtcattagtagccagaataaagttgcaatcagtattcaatttatcaaatacaaagacgcgaataatttgctcatcactgtctaatccaatttcttgtgataggtgttgtcctgtttctttccatttggtttcaattagttcatgtactggacgataaatgacattccccttattggtaaataaatacaagttagtcagggtagatagtgtgttttcataaactactttgtcaccatctggtaaaccattgtcatcatcattagttgactgatatgaacgtaaagatgaacgctttaaatagccatctcgactaattagtactctaacctgttcatcagcaactaaggctttttcatcaatttcaactttagcactttcttctgaaatttgagttcgacgtggattagcaaattctttcttgactgcatttaactctttaataatttctttttctaaagttgcacgatctgataataatttacggtatttttcggccaatttatttaacttgtcttgttcagcaattaattcattaacatccgtattagttaaacgataaagttgtaaagaaacaattgcttcagcttgtttttcagtaaatttattatacttagctattaaattcttcttagcatcggctttatttttagaagcgcggatggttttaattacttgatccaaaatatccatggcatgaatcaagccctgaataatctctaatctagcttctgccttatctaagtcaaatttcgtacgtttagttacaacgtcttcttcatgttctaaataagaagctaaaattcgttttagcccaacttgaacaggagtcatgtgatcaatagcgaccatgttgaagttataagatacttgtaagtcagtatttttaaataaataatttaaaatattctgcgcatcagcatcttttttcaattcaatcacaattgacaaaccatggcggtcagtttcatcacgaacttctgcgattccatcaatttctttattcagacggatttcatctatcttttttactaatagtgctttgttaacatcgaatggaatttccgtagcaacaatttcttgcctatgcccacgaatttcttgaatagtggttttggcacggacttgaattctaccacgtcctgtcttatatgcttccttaattcccttagtccccataacaatagcaccagttggaaagtcagggccttttacatatttcatcaaatcttcaagagaagcatcaggatgtttcaataaataaattgttgcatcaatcacttcacctaagttatgtggtggaatctctgtagcgtaaccagatgagatcccagttgatccattaactaataagttaggaaagcgtgcaggtaagactgtaggttcatactcagtatcgtcaaagttaagcaccatgtttacggtttgcttatcaatatcttgcaaaagcatattagagattttgcttaagcgggattccgtataacgcatagctgctgggccatcaccatccattgaaccattgttaccatgcatttcaactaacggttcgcgcatcttccagtcttgtgataagtgcactaaagccccatagattgagctgtcaccgtgagggtgaaagttacccatgatattaccgacagccttagcagcctttttaaatggtttatcataagtattactatcttgatacattgcataaaggatacgccgctgaactggctttaagccatctcgaatatcaggcaaagcacgttcttgaataatatattttgaatatcgtccaaaacgttcacccattacttgttcaagtggcatttctcgaattcgttcttttgtggtcattaaatttaaaaccttcttttattcatcttcggattctagaattgagccgtcttcgcccattctgaatttaacattttcttcaatccactttcttcttgcggctactttatcacccattaaggtagtaactcgtctctcagcaagagcagcatcgtcaattttaactctgattaacattctcgattgaggatccatagtagtagcccatagctgttccgcgttcatttcacctaaacctttgaatcgctgcagcgaatagccacgtcccattttcttttcatcatcagctagttcttcatcagtccatgcatattgaacttgcgtctttttgcctcgacctttttgtaagcgataaagcggtggcagagcaatataaacttttccgtgttcaatcatcggccgcatataacgataaaagaatgttaatagcaagatctgaatgtgagcaccatcatcgtcggcgtcagtcatgataatgactttatcataattagagtcatcaacattaaactcggttcctacaccagcaccaatggtataaatcatggtattaatttcttcgtttttaaagatatcctgcaattttgccttttgagtatttaatactttaccacgaagaggcaaaattgcttgaaatcttctgtctctaccttgcttagcagatccaccagctgaatcaccttcgaccaagaatagttcattctttttaggatttcgcgattgagctggcgttaatttaccagacaaaacttctttttttcgtctctttttaccattcctgctttcatcacgtgcctttttagcagcttcacgtgcatccctagccctttgagccttcttaactagttcctgagccagctcaccattttccattaaatagtaagacattttctcataaacaagtgaatctacagcagaacgtgcttgtggagtacctaatttacccttagtctgtccttcaaattcaagtaattcttcagggattttaacagataaaaccgcgctaagcccttcacgataatcagaaccatcaatatttttatcttttttacctagtagaccctgctttttagcataatcgttaaatgcacgtgtaaatccactacgagcacctgactcatgggtaccaccatcaccagttctaacattgttaacaaatgaaactaaattttctgaatatccatcactatattgacctgaaaattcaatttccatgccatcttgcttgccttcaaaataaaagacatcactaattgtgcctttaccttcgtttaaatacttaacaaatgatttaattccatcatcatactgaaaaacatcatgatgttctggctcacgctcatctgttaagaaaaatttaacccctttaagtagaaaagcatattcacgaattctctcctgaattgtctcatacttatacttcgtggttgaaaagatagtctcatctggcttaaacgtaatggtagtccctgttggctcttttgtctttcctacacactttaatgtacctaccggatgcccaccatctttaaattcttcttcataagctttaccatcgcgaacgactctaaccttcatataacttgaaagtgcattaacaacggatgaacctacgccatgcaacccgcctgaagttttataattttgttcagtaaacttaccaccagcatgtaatacagttaaaataacttcaattgtgggcttacccgatttgtgcattcctgtcggcataccacgcccaaagtctcttacagtaacactattatctgaatgaatgattacatcaatttctttaccaaaaccagccatggcttcgtcgacagagttatcgacgatttcatacactaattgattaagaccatgaatatcagttgaaccaatatacataccaggtcttttacgaacggcttctaggccatgtaaaatttgaattgaagaatcatcataagtattagcttttgccactaaaattcctccacttgttcattaatttaaccagcaccatatatttaaaagataatctttgctaaaatagcgatagattaataggagtgttgttaaatatgtttgcattaaaatttgcatcgttgtttattttagcatacttgattggatcattcccaacaggtgtgttagtgggtaatatcttttttcataaagatattaggaaatacggatctggaaatatcggaacgactaatacctttagagtattaggaccagctgctggaatcattgtctttatagtagattttctcaaaggaacttttgctacagtattaccaataatttttaaactaggaccacattatctttgcttgatttttggcttagctgcaattttaggccacgcttttcctgtctttttaaagttcaaaggaggcaaggcagtagcaacttccgctggatttttactaggatataatgtccattttttcttgatctgtgcgttaatcttcttccctatcttatttattacaagtatggtttcattaactagtttgatctcagtagttctaatctttattgcttcattctttttccacgatcttgccttgagcattatcagtggattgctcgtaatcttaatttactggagtcaccgaagcaatattattcgaatcgaacatcaccaagagaatctggttccattcggtctagtgtattggtataaaaagaaacatactaactcaaactaaaattataaaaccagcaagcatttagcttgttggtttttgtttacctaaatattatacttttgcaaacaatagttcgcaagtacaaacaaatatttttattttattataatgatctatttatttcaaaatcttaattaaatcgtctttactcattgttgcatcagcaatctgatcattttgcaaaattatatcagctaattctgctttcttttgctgtaaagcaatgattctctcttcaatactgtcttctgtaaccatcttataaatcttaacagaatgcttttgaccaattctatgagctcgatccgtcgcctgtttttctgcagccaagttccaccaaggatcataatgaattacaacatcagcaccagtcaagttaatgcctgttccgcctgcttttaatgaaatcaaaaagacccctggttgagccatttgattaaacttttgaacttgttcttgacgcttagttttaggtgttgatccagtaatagtaaataaaggtagtcttaatctggcaaggttttcatgcaaaatatctagcatagctgtgaactgtgaaaacaataaaattttatgtccatttgctagattattcttaatcaactcaattgtagcaattaatttattagacttgccgtgatagttttcataaagcaaatgaggatcacaacaaatttcacgtaatttagtaatctgagccaaaatttgaaaacgtgatctcttaaagtcttcatccccctgtccatttaattgagcgataatcttttgcgtctgcatattatacaaatcagcttgtttcttattcattttaacaggcacaatttcttcatctttgtcaggtaagtcacgtagcacatctttttttagacgccgcaagataaagggtattatcatattagctaattgatcttctgcttctttatcttgctctttaacaatcggtaattcatactttttcctaaagtcaggatataaacctaaaaaacctggcattaagtaatcaaaaatactccataactcgctcaatttattttcaatcggtgttcctgttagagccagtttatgatgcgctttaatgactttgactgtcttggcggtaactgattgctgattcttaatattttgtgcttcatcaattacttctacatcaaaaattagattttggtacgcttctagatctcgattaagcgattgatatgaactgattagcagattatactttttagcatctaaaagcaatctctctcgttcttttttagtgccatctaatagagccacattaaggctaggtgcgaactttttaacttctgcctgccaattatagataacagaagcaggcgcaacgattaagctaggtaactgattttgcattttttctttgcgagctaaaagaagactaataatctgcaaggttttacctaatcccatctcatcagcaagtagcccgccaaatttataattaacgatagtgcttagccaattaaaacctatcttctgatatggacgcaaaatattttgcaaactaactggtatttgattttgcttcaactgattcttagctaaatcattaatcagagtattaaaggattcattagttgagaaatgcagtgcattagcagctttcatttgcttagcaaaataaaaggcacgatatgctggtaaatgtaatttaccgtgaatgaaatccttaaaactaatacctaaatcatgcaaagtttgtgccaattgttcaattgtcggttgttctgccttagctagcattccattttttaaaacaaaatattttcgcttttcttggtaggctttcaaagccgcttgaatgtcttcccagctcatcttttgatcagcaagatcgatatctaataattcattagtcaggttgatacctactccaacatccaaattaatctttattccctttaaaagtgatctaaagttagctgtaatttgtacttcgcctaatcgtttcaactcattgataccatcatctagaaaagcttgtacgacatccgagtcttcattggataaaacataccgcccatgctgataatcactaaaatatgtattaatgtgcttccatgctgcggtctctttttcaacatcgcgtcggtcctcttcagtatatccttgatttaactcgtattgtgcatccccatactgtactcgagccacacataaaatactgcctacacgataatctaatttaaacaaaaaatgggcctctggtggcaaaatagctttcaattcatcagtaccagacactaatataaactttgtttgctcaaatttaggcaaaatattatgtgcaaacttagcaacggtctttttactaaattgcatttcagcaccaggctgcaatcctaaattatgcaaagaagcaggcgtaagacctatatatttgatccatacatctttgtaatagccataatacgcatgactcccagtaattatagtagaaactggaagatcctctacactaactaaagcagatgacttttgagtttcaattttaatgtttaaatctagttgatcagttgtatatcctataggctgctcatttgagtacaactttacgccttgataaagtaaatcattaacttcatcggccacagagttctctagtgtaatgcgaccaacctgactactgtaattataataaaattcttcgtttagattacgagcatctataattttttcaataaaagataaccagtgttgactatcaatatccattttagcctgatttataggctcgttgaaaaacttacctagctttagagaagagctgtgtcgggatgcatctactagttgattaagatctttaactttataaagatgcttgttctttcctaatttaaacgtcaaactagggatgttattatacttatcaatacttgcccgcaaaataatcggctcatcattttgggtagaagcgtcactataaaattcaagtagatcttcagcggcctggttagttaaatcaaatggatcgtcatcaagatactcattaataaagtaaaacagagctaatattctaacactatctttttcaatacgggaaaaatcactatcaaatttaattgatataatttgccagcgagtaaattgcacagataatgtaattaactcattgtcctctgttactatctcccaaaaatattcatatttacgcatcttatcatcaaaatgccgacaactactaatcgaccagtgatcattaagttccagtgcctgatcataactttttttggtaaatttcatattgccaatcaaatttaaggggttaagtactgggcttttatgtgcaatcatttgcttaagatgttcagaaattaagtcagcaaaagggactttaacgttatgttcattttcttgttcgttttctactgcaagtaaagccgcaacctcgtgtttacagcgatgccctttattagcccatggacaattacagtctaactctgaagctcgaccatctaaacgaagacgaccagttacagtataagaacgacccattccgccttgaacttgagcggtaaagtgttcctgatcttgagctaattgaatattttcaaccatatcattgccataatatatttctccacgatcaaaaactcgttcaggaaataatctatgccatctagacatttacatcacgctctttcataattattactacttacactatcataattttttagttgttaataataaattgtcacaacatttttagtgagcattttattattaacgaaactgtcaaatcttttgtgtaaatagatctttctcgtaaattgattttttaattatttatttaatcaaagtaggattctaaggtgtcctgaacctgaccaaagcctttatgaattcgattgaaataacggtcattgtagctcattgcctgaatgccaataaaagcatcaagcgactgttcagttggaaactctgccttaggcttagctttgcgcttgatcacattgttaaatgattcaatcatgttagtcgaataaattgaagctctgatctgcttgggatagttataaaagaccagcagatctggttctatgtctttcaagcttctgataacatggctgtaaaccttgccccatttggtatagaagtcatgcaggacagctgtggcttcttctttgtttgtctgttgatgcacctgtttgaattcgttcatgatcttttcacgatcgtcgacgcgtactttagcgcagatattgcgcatgacatgaaccaaacagcgttgaaaatgagctttaggataagtcctggccaaggctgttttcatgccaacaacaccatcagaaagaaaaagctcaacttgctttaagcctcgggatttcatgttttgaagcatctctgtccagacttcaatgttctcgctaggcgcaatgcagtagtcaatgacctccttgtgcccattaggcttgatgccaatggcaatatagactgcttcacgctcaaatgtttctcggcgcaaaggaaggtatgtcgcatccaaatagacgcagaaaaacttgtcgcttagcttgcgtttgtggtaagcctcaacctttggaatcatctgcttggaaatatttgatacctgagctggactgtaatggctgctatacatcttttcaattagatcggctatttccctggtggtcacgcccttggagtaaagcttgataatcatgctttccaagacatctgagtgctgcttgtagtcaggcagcgtgtgctgatgaaattgaccgttgcgatcccgaggcacttgcacttcaattgggccaaattgcgtatcaactttgcggaaataagcaccatttctagagttgccagtattccagccatttctggcatagggatcatagcccagaaaggcagtcaattcagcttctaacaagttattaacagcctgttgtagctctttgcgcaataaatcatttattttgtctggattgaatagagcttgagcaaaatctttggtaaaatcattcatgaaggagttcttctttctgtatgtgtttttttgttcaaaccaatcatacgagaaaggaactcctttttctaatgtttaaagaaataaatttaaggaatcattcatccttacacaaactattttacagtctcttattaacaaatcatgcgatgatcttataataaaagtatagaaagtacagtattatcatatagacttatataagtatcagctaatgtaaataaaatacagaaaggaaataaaaatgactcggcaattaaaattgctgaagacttagattgctatacagaactactttctggaattacaagaaaatttcagcagtttagttatcgtaagctttatttatatgatattcaaaaaacaattcgtattttaaaaatctaccaggaatggcttttagctcaatcagatcaaaactttagcaagctttatgataaattttgggcacaatgtgaaatggatattacagccgtctctctactgcttgtgccaaacgtacatgataagaagcaggaaatagaacgcatagatcatttactcaatcaaattaatcaaattgggacatcatatttactaaatgacgttcaaagtaacgctgtaggttccgccatgaacaatgctatttatccggctaaccgagctggctagagcaaatttatcaaaatagtcaaagtgaaaataatattgaatacaatcataaactgcaaaatttcttaagtgttcattcagagccttatcctgatgcggatacattagttattttctttactaatactaaataaaagacattggccgtatttaccaatgtcttttatcatttttcgttttcattaattcttaaaggatataacctatcatcatgttctgcaggagcatcttcttcgagtaacaaatcatgattaaccaattctttctttagtcgtttcaccgtataagaattgcaatgcatgtcatccattagctcttgattagaataaataatatacatattaccgtcagcatctacccatccattggtttgtgaatcaatcattctcatcgtaagtatcatgtataggtatcatgcatcggggcttaacttcttatacttgggattatgaaaaaatgcttgtggtagcccattttgctgttccgggtagttttcgccctttttaaatttacgaatatttgtatacattttgacctcttcactttacatagctttttcctttacattaattataatgtatatttttattagatagtaataattggacttactagtaaattatgcaggccattaaattaatcagcaatattcgcacctaatgcatttttaaagtgagccattgcccattcatcgccatttgatgtaaaagtagcaacagcagaacgtggaattgtaatttcatagtctaaattatatgccgcaatcgctgtgtgcaatacacaaatatcagtacaaacaccagttagtgtcaggtcatgaatatggcgttcacgtaaataattatctagattagtattttgaaaagctgaataacgatttttatccattaataaaacatgatcattatctttgttttctaaataccatttacccgtttgaccatatacttcacggccagcagttccaataatattatgcggtggatataatttagtttcagggtgatatggatcattttttaagtgcgcgtccatcgggaaaatcacccaatctttattttgtagaaactgtttacacagttctgtaatacgttgatcaattgcttgagcaggctggccacaagtaagagctccatcatcagctacaaagtctttactatagtcgataactaataacgcttttgccattattttctcctttataaaataatatttaaaatatacctgaaacttgaaagctaagattaacgctccttccccgcgcctcttggctttttcttatcaaaaataaaaacgcaggctctctctgcgttatactttaagtgtcgacctaaaaagtaaaggagatcctgcgcaatgaacagtatagaacaaatcgacacagaaaatgatactaaatccttaatttcttcatttattaatctaattggtctagctaagttaactaaacaagtcaattttaagcgtaaatccaccgtttcattaaccatgattatctcttggctgatgtcagtacattttgctcggctttctttattcagagctaaggatgacaaacgtttttccgttagaactgctcgcaatgtacttaacgatggaagaatcaactggcaaaaactattatgcttgattgcagcccggctcattggctgcttaaaaccatttatcgataaaagacgccgacttgcttttatcgttgacgatacgctgatggctcggtctttttctaaaaagaccgaattgctagctaaagtctatgaccatgacaagcatgagtatttgaacggatatcgtggtttaactttaggctggagcgatggcaataccttcttgccggttaactttgccttgatgtcaaccaaaaccaagaaaaatatgattggagctgctcccattactgctgatgaacgttcaatttctggtaaaaggagaaatcaagctcagagaaagatgaatgatgtaactgtagagttgattagacaagccttacgattaggagtagaagctaaatacgtcttattcgattcttggttttcttctccaagaatgttttggattttaaagaagatcggtttagatggacttggcatgatcaagaagagttcaaagatttattacatttatcgccatcgccgctatagcgttaaagacttgtatgatcgtttggctgcttcaaacatccgtaaaaagaaacattatctttattcaagcatagttgatgctcaatatcatggacatagctttttattaaagctcgtctttgtctccaaccgtggaaacaagaacaagtatttggttttagctactactcagacaaagcttagccctgaagaaatcatccaactttatggtcgtagatggcaaattgaaacatattttaagacgtctaagcaatatcttgctttagataaatctcaagttcaaagctatgatggccaatgtggctatatcgcagttacagcaataacttatgatctattgacctggcaggaaagacaaaatacagatgataagacaatcggagatttattctatctaatgaacgaatccttacctgatattagattcgtagatgcattggtctacttaatttcagaattaaaagagcttaaacagaatagttttgaaaagatagatgaagtaatcaatgactttattaaccaactgccacgattcatacaaattgcactgaaacagatcatataaaaactaattacgtctaagaaagctcaatagtgacaggacttgagcttgattttggtgctttcaattttcagaaatatacataattaaattaattattgctaaaatcactattgatataatgaataccaaataaatccagacagtaatattaactaaaaacggtaataatgcagcgtgaaagcctagaaaagaaactaagagaagcataataaaggttataccaattaatcctaaaaaagcatatttgccactacttatatcagcctcgcttaaatcgaatccaccaaaacatagactgattactagcaataaagcaacaattgagtgccatattgaatcaaaattaagctgaaataattcaaaaatataaatccaactatgagttaagaaattccagttaagtgcattaccattacttaataactgagtagtaagctgattctgaaccaatgaaataggtgtattcaatgtacgcatgattatgtaaatcagcaaggtgcatcctaatacaggtgcaatgccaataaaagcattacccaccttttgataagtagatgtaggagaccaagtatgtttaacatagccaagtgacatatcattggtattactagggatgcgcaataaactaaccgcattaatatgatgaccaaaaattatagccataatcaaatgactaagttcatgaacaataattcctaatccgccaacaataatttgactattaaaaccaaatgtatttaccaatttttggttagcttcatggcttaattgtcgtaatgctaatacaaataaagccggaacgagtaacattaaaaaagtcccattaagggcataaagaatatgtttcatctctgatttaaatttgttttacatattgagtcaataatgttaatgccgcaaaaagctgatcaattacgccatcagttgcactgaaatcagttttaacaaactgaataacccaattatttttaattggaattaaacgaacaacttcatcttgaccataattaagccgtaaactattggctaaaatcacttcacgataacgatgtccatcacttcctagccactgtgttgtttgatcagtactttgcttaattaggctataagctttggatatttttcgcaacttattacgcagatcaaaccaggactttatttctactaactcactatttttaacatattcagataattgcatgccttcttgactttgcgcaattctttctaatgtagttaaggcaatcgccatagatttgagcgaatcaattgaaagttgcggcattaaaatttggattagccaattgtgactgaattcatcaggtggatacagtcgactaacttcaagattattttcaaaaaatacacgatatgtattcttacttaggctttcatattctttttcaccatcttgagtgcaatacgtcaaaatgacattatgtttaatttttcgaatggcaaaattatcgtctgatgaaaaaattgtactttcaaattctgtaaaatctgtcattaaattctatctttcgtctataattttatttatcgtgtttactaaaatatattgctctacgcttttttaaactagcaataaccttatcaatgtcttcatcagacattcccctgcgtttggcattgtttcgccattgtaattcactgattggagcacaactaacagtattcaaattcatccatatccagagcgataacaaactacctgcaagacctactagcacaaatgtaccagtaataaaagttaaagatcctacgaaatgtgatacgctccaaagccaaccgaacaaggttatgatatataaaataggcaaaatagctggacgatgattttttccatattcagcattcgggccaaagaaagtttgccaataacgaggtattgagcgattaattactaaatttgctaatgctaatagtaagcaaattagtacagaaacattagacttaattaataaaatactaatagctgacagaatgattacataaaatgtagcaaaattagtagaaaagaaaacccaacgtcgaaatttagcaccattgccaatgattattgcttgcttaggatttaatgttgtctggaaaaacattttatcagttgagacagtttttcgattaaagatatcaaagtgcatctaattctccttacaagcttaattttactacatttctagctatgacttaaatttcaaaaataaaagcggcttacatctcgtaagtcacttccgttaactaattttcaaaccaattccaatcatcgccaaccacgtcaactttagcatcatcggcagctgctgatctgattttttctgcttgagttgggcgttcaattgtgaagccattgttagaatctttttcaaccatgccttcaaattcaactacatcgcccctcttcaaatcaaggtctttgaaagttttcaagtaatgcagtgctaactgcttaacaattggattgccaccagcacctgcaatacgcaaatccttaaaaatagctaagcgatcgtttaatctatcaaaagtaccactaaatttatgacgcttaccatcgtcgtatggttcaagtttttcattgtaaatatctacagacatatgtacataatcttctttctacctctctaatataacattgattttgataaaataaagaggctagataaataaaaatcactctttaatccgattttaacgtatacttttaactgtaacttaggagagaaaatgagcatttattatcaatttggaattattataggtttggttctgttggctttcgccattcacatcgcaatgaaacaacataaaactacctttccattcaacattgtcaacttaggcattgcattcataatctcaacattagcaatttatattattgtagcctgtctaggagcaattcaaccgcaaaactggtaaaccaataatgcattatggaaatttttaatagctagttaatcataattgagaaaatctaaaaaagattttctcttttttattaaaatacaattttatttttttattaattgattaatcactctatcttgtgtaatttgatacaagtttagtgtgataaatgtatttcgttttttcatataaaaaaacaacctcagagaaattatatatcaaaaggagactgtcaaatcttttgtgtaaatagatctttctcgtaaattgattttttaattatttatttaatcaaagtaggattctaaggtgtcctgaacctgaccaaagcctttatgaattcgattgaaataacggtcattgtagctcattgcctgaatgccaataaaagcatcaagcgactgttcagttggaaactctgccttaggcttagctttgcgcttgatcacattgttaaatgattcaatcatgttagtcgaataaattgaagctctgatctgcttgggatagttataaaagaccagcagatctggttctatgtctttcaagcttctgataacatggctgtaaaccttgccccatttggtatagaagtcatgcaggacagctgtggcttcttctttgtttgtctgttgatgcacctgtttgaattcgttcatgatcttttcacgatcgtcgacgcgtactttagcgcagatattgcgcatgacatgaaccaaacagcgttgaaaatgagctttaggataagtcctggccaaggctgttttcatgccaacaacaccatcagaaagaaaaagctcaacttgctttaagcctcgggatttcatgttttgaagcatctctgtccagacttcaatgttctcgctaggcgcaatgcagtagtcaatgacctccttgtgcccattaggcttgatgccaatggcaatatagactgcttcacgctcaaatgtttctcggcgcaaaggaaggtatgtcgcatccaaatagacgcagaaaaacttgtcgcttagcttgcgtttgtggtaagcctcaacctttggaatcatctgcttggaaatatttgatacctgagctggactgtaatggctgctatacatcttttcaattagatcggctatttccctggtggtcacgcccttggagtaaagcttgataatcatgctttccaagacatctgagtgctgcttgtagtcaggcagcgtgtgctgatgaaattgaccgttgcgatcccgaggcacttgcacttcaattgggccaaattgcgtatcaactttgcggaaataagcaccatttctagagttgccagtattccagccatttctggcatagggatcatagcccagaaaggcagtcaattcagcttctaacaagttattaacagcctgttgtagctctttgcgcaataaatcatttattttgtctggattgaatagagcttgagcaaaatctttggtaaaatcattcatgaaggagttcttctttctgtatgtgtttttttgttcaaaccaatcatacgagaaaggaactcctttttctaatgtttaaagaaataaatttaaggaatcattcatccttacacaaactattttacagtctcaattaataactagctcactttgaaaattaaactggttaaataatatctacttacttaattcaataacttcttaatactaataaataaatcctaaaaaaggtaggtcaaaattgacctacctttttgtttaagctttacataattaaaaatatttttataaatcttgatccgtcttggtcaaatcactacgatctgaaatccaaacatatagcggcaaattaatcttacctttttcatcgattgcatcaacgactttttcaatcaaaaattcttgccatttctctgcaggttgcatccctgggtgacccaattgtggtaccaaccatccatttgctaatggcttacctgtagtcaaatctacaatcatgccgacagtataattataaaaatcaaaactaccttcaactacaatccaattactactatttatcaattcagattgcagcttagttaacatttccggcggaatctttccttctgtaaccatcattctgcccttaattggaccatttttcttttcgaagtcttgcaaaacacctttcataaaaagcttttgccctaattgatcaaattttgtttcatcttttaacataatcatgtccgctttctttagaatcagtatccattatactaaaatttgtttagtatcgtatcttcacttgtaaattagagtgatcacttgtgtcgtacagcgtctttagatataaccgatactcaggatggtgcttaatcaaaacttgatattctttagaagcatggattttattcaactcgctagcctttatatgattatgaccattaaagaaatgatagttcatccagccaaacaaattccccatcgccctaactaactcgatgtcttcgtgatactgatttaattcactttgcatcatatccgcagaaatactaccaagctgtagatcttttaaatacttatgataatgaactaaagtataattttccttttcctcatccgttaaatatcttgtcatatcaaaattacgccgcacatatgtaatgtgccgtgaatgaactcgcactactccatagccttgatcattagaacaaaaacttgatgtaacgatctcagttgtaggcgtcatgtcttgtggtcccataatattttgagcatgaatatgaccagaaaaagctaatttcacgttgtaacgcgcacacaaacgtcgtagctcaacagcgtcatcaactacatagcccttgttaactgctggattatgtgcatataaattatgatgcataaataaaaccggacgtaactgatgttcctgcgcataacgaaattgtttttcaatccattttaattgtacttttccaatttcgccgtgagtgtgcggtgcttctgttgtctcttcttttccataaatatttgaatccgctaaaactaaaagatattgcggattcagttggacactgtaagccaatgaattatcgtcttcatctaaggcctcacgatatgatttatcaaagatcgagcgccaaaacattgggctaatttcaccagcatagaactgttttttaccacgaaattctctagcccacccatcaaaaatgtcgtgatttccaggtaaaactaacactttagtttctttcaacggcttaaaaatttgagcaaatttctcagcagaaactcgttcaccgttaaatgtcacatcaccagttacaataattgcggcaggcttttttctttgtgccattcgcataaaagcagaaagggctatttcttgataatacaaatccttaccttgactagttttttgcatgcgtgaaaaggcttgtccttcatcatgtaaactatctgcgattaggtgcgtatctgagatcacccaaaattctgtgttaagctcttttgtaatcatttcttaccttctgttagcccaatactgatagaaatcaacccgcaaatttccgttaaatagtttgcgcttcttagtagcctttgcaccaaaacatttttcaaagttaggatctgcagttaagtaatactgactgaacgaactaagcggtctaagtacttctcccatttggcgatacagctcttctgccgactcacgatccttcaatcgcttaccataaggtggggtcgcaattataattccattttctagatcagtagtaaagtctttaactgcgatttgtttaaagcgaatatcttgcaatacacctgcattgtgagcatttaatttagctacttcaagaacagactgatcaatatcactagcccaaatcggtgcttcaagcggcttaacttcactcttagcctttgccaatacttcattatgtagtttagggttaaaccattcaaaaccatcaaaggcaaatttacgccaggttcctggtgctatatttttagcaattaatgctgcctcaatagctaaagttcctgaaccagtcataggatcaattaaggggtgagtaccattatatggagttagttttaatagcccggccgcaaagttttctttcataggggctccaccatgctctactcgatagccacgtttaaacaaactagcgcctgtagtatctagcgaaattcgagctacatttttataaatatgaatatctaagggatattcattaccagtttctggcaaaaagccacgacgatggtactggtcaaccatcttattaacaattgccttttttacaattgactgtacatctggttcagagtgcaatttggattttacagctctaccttgaacaggaaacttagcgtcaacaggcaataattcggcccaatcaaaatcataaatctcattaaataaggtatcaaaatctgttgctctaaactcttttagcaaaattttaattcggtcagctgttctcagccaaagattagttctaactatatcttcttgaccacccttaaaaaagacacgaccattttcaacacgggtcttataccccatagactgtaattctttattaacgacactttcaaaaccagcgcccatagttgcgtaaagttggtattctttcattgttactctttcattttcaaaataaaaaagagctggacctaaaagcccaactctgcctgtgtgaatttctataagccacgttttgttccaataatctctggcaaagattaccttgagtagtcatctatctttactgcttaaagcaataatccgacctttagttcatttccttaggccgaaactcccccaccaaatttgggtttcacactcgcagggtttacctcgttccaccaaagtcatttctgaccttgcttcgtcactgtggcacttttcaggatagtaatgcatgtccgaagatttagcactttttccgccgtgaagactaacgtcctcctccagcttgttaggctgaatacgatcactacaaacatcgcagtctgtgtgtgcgtggactttcctcagctaacataagctagccgcgcctactcaaaattcacactgttagtcattatagcaaaaattaatgctttaatccataaacgtgttgttctagattataaacttttctttccaaagttgaaatccgttgaataatagccatattagtcgaaatttcaccttgagtatcatctgcatcttctgcaaacttcacaggcgcacttcttctatgcgttggcatataagtcttaaccttttcttcttcagcctcaactgttttctttgctttttgcttttcatccattaattgacgttggagcgtaccgatctgaccatacaaatcttcgataatttgttgaaaagtagtataatcagaaattacttcatctaagtatgcatcaacttcatcgggatcatatccctttactttacttttgaattgtttctttaatatatcttgtcctgataattttatatcatttaaatttgccatcttactgacaactcctttacattccaccctattttagcaaaaacaacgctgactgaaaataaagaaacagactttaataaaatttttaccatattattcagaaaaatgatttatttgatgattttcttggtattcttcagctgcatcttgtaaatcataaaaatcaattaaatctaatggatattctttagtttcctggtatttttggattaaattataatcatatttaggtttacctgggtgctctgaatcatagatcatcaatgctcgatcagtatgctgaatcataaaattttgataattacgtaattgaagtggactttgataaggggtattagaagttgaagcaaaaaagtccactttttccttcaaatttaagaatttagctttgttactatcattccatcgattagcaaattcttcatatggaatcattattgatgttcttaccggatatttttctcctaattcaagtccaacctcagctgtccactgttcgacaccgaggttagctccagtaataatccagtccaattgcccatcatccagtagacttgtcagataattttttagggcatatttaatgacagttatcttgggatcacgatcgccaaaaacatttaattcatagctgcgatagccagtcacccataaacgctgcatttgtttaagcccccctttatgttcaaaaatgtagtctttattgctataatgctaacaggagtgaggacaatggtcaaatatcctagcggtagtttagccgcatttagaaaacctgtaactaaaaaagatgaacatccagttcaccgatcatatcatcataaaaaaggtgttaacttttctgatcgtgggatgacacttgagcaacaaatcaatgaatctaataaatattatttaatggaagaaattgcagttgttcataaaaagccaaccccaattcaaattgttaaagttgattatcccaaacgttctaaggcggtcattcgtgaagcttactttaggcaagcttcaacaactgactataatggtgtttataaaggatactatctcgattttgaggcaaaagaaacacggaataaaactaacttcccattaaaaaactttcatgaacaccaaatttttcacttggacgaatgcttaaaacaacaaggaatttgttttacaattattaggttcgctagcttagagcgctactttgttactccagctagttttgtaattcgagcttggcgaaaaaaagataaaagctcaatgactttaaaagaaattgaaaacaattcttttgaaatcaaaagtggctttcgtcctacactgccttatcttaaggcggtagataaattcattgcagataggaaaagataatcatggcagataataacaataatatgaaacgagaatcacgaagagactatcatggtcgaaggccaagtagtggccacttatggattagaatcattaaatggatctttttgctgatatttttaatagtaatctctggaatcgggctttttgctttttatgccaaagatgctcctaacattagtcaggaccaattgcagagtggtaaatcttcaagtctatatactaataatggtaagtttttactatcacttagttctgaaaaaagaatttatgttaaaaataaagacattcctcagcaattaaaagatgctgtagtttcagtagaagacaaacgtttttacaaagataagttaggcgttgacccaattagaattattggttctatgttaactaatgccaaaagtaatagtattgctgcaggtggttctactataacccagcagttagttaagctaacggtcttctctactgctgcttctcaacgtactctgaagagaaaagctcaagaagcttggttagctatgaaagtccaacatgaattcagtaaagaccaaatcttagaattttatattaataaagtctttatgaactatggaaattatggcatgggtactgcttctaactactactatggtaagccactaagtaagttagatttggcacaaactgcattgattgcagggatgccgaatgcacctgttgcatatgatccatatctttatccgcaaaaggccaaataccggcgtgatattgttttaaagactatgctacaaaatgacaaaattactaaagctgagtacaatcaagcagttgctgaaccaattagtaagggacttaaatcacatcgaaataataacgagtctaagattagaaaaattgatgatccatacattaaagaggtaatttctgaagttaagagcaaaggctttgatccatatcacgataatttaaagattactattaatatcgatcaaaaagctcaaaacaagctgtacgagttagctaacaacggttctgtaccttttacaaacaataaaatgcaaattggtgcaactgtagttgatccaaacaatggtcatgttgttgcaatcttaggtggacgtcacttaccttctgttcaattaggattagaccgggctgttcaaactggacgctctaccggttcgtcaattaagccagtacttgactatgcacctgctattcaatacttgaattggtcaacagcaaaaatgattgatgacagtaagtatgtttatcctggtaccaatatccaattatatgactgggacaacaaatacgacgggatgatgactatgcgacatgcattggagcagtcacgtaatgttccagctattaaaactcttgctgaagttggagtaaaacgggcttcagcttttgctcgccgaatgggcgttaatgtttcaccaaaatctggtttatcagtagcaattggcgctaatgcgtctagtttacaaatgactggtgcttatagtgcttttgccaccatgggcgtataccacaagccgcaatttgtttctaagattgaaacaccagatggattaaccagaaattatgattcaaatggtgtacgtgtaatgaagaaatcaactgcctacatgattaccgatatgcttaaaggcgtaatcaaacgaggctctggtactaatgcaaaaattgcagatctttatcaagctggtaaaaccggtactgttaaatactctgatgaagatctagctaagtacccaagctataattcaactccaaaagattcatggttcgttggttataccagatcatatgttatgggtgtttggactggttacgataatttaaaggacggtactatttctggaataggtcaacaatctgcacagctaatgtataagagtatgatgacctacctaatgaacaataagcctaacctagactggaaacagcctagctcagttgtaagagcgaaaattgtaaataactctaatcctccagaattagcaactggtggcggcacttggcaattatttgttcgaggccataccccagccggaattggtaatagtgcagcaagttatgatgaagacgatgaagaaactgatacttcaagcgataatactggaactactccttcatcttctagaactgcagttactcaatcatcatcaagtcgtgaaaatggctcatcatctcaatccaatagcagtcagcgagcctcttcctctcaaagaagaacacaatcttcttcaacacaacaaagttcatcaacgagaaaacctgaggaagaatcacatgaacgtaatgatgattcggataatgactaggcaataattaaatatatttattaacagatagcgttttgttatctgtttttattttggccgaaacgtagttgaggcctgaaattataaaatcaaaatttagtaacaacagattatataaaattattcaataaaaaaagccgaatttatttcggctttacttttcggaatttaaataagaatacggatcgcctttagctcgagctggcattgtataacgaccaaatagaatcatcgcatggtgcgtttttatccattcacttttaggtaaaattgcttctaatcgcttctctacttcatgtggagtagctttgtcatctacaatatggaactttttagaaatccgtgacacatgagtatcaacagcaatagctggcacaccatagccttcagccaaaacaacgttagcagttttctctcccacccctggtaaggtcatcaataactttttatccttaggaacctgtccattatatttatcgaccaaaatttgcgcagtggcctttaaatgtttagcttttgaacgaaatagaccaatagtttttatctcatgctcaatctcttcaattggagcttttgctaatacttctggggttgggaacattttactaaaactaggcataacacgattaaccatcttatcagtcgtttgtgcgctcaacataaccgcacaaagtaaatgaaagttagtatcccattgcaattcaccttgtgcgtcaggatacaatgctaaaatttttttcaaaactctacgtgcttcttcatcactcaataaatcttctgtcatttttatcgattccttttcaaaaatctctcaacttcatcagttgttttcagactatgcctttgccaattaagtaaaacacgatcaatatactttaaagaatatgcctgagacaatacagcctctcgcaaagcaagttcaattaattcaggagcatagtgatccacacttaaccattgcgcaatctcttctcgttcaattggactcagatagcgaccaaattcaacttctacttttcgtgacaaataatttaacggattattttctaaattattagcaactgaaacagttttatcttttttcttatctttgatcaagacgttttgatcaatatagtgatcaagtgcattatacaacttattgagactatatttattaccaattttatcctgactatcagtcatttgttcaatagttaaataatttcgttcaattagccgctgaataagattacccacatcactaaccgataaattagtattagcagcaatcttttcattagatggaaaactctcacctcgttggctaaatgcttccaattggattatcaaaattagttcagcatcactaatgcctaattgagggtagtaagcgatcaatccattttgtaaggttgtaaagcctaatgcccgataatcattaaattccaaaataatttcctttcaaaaacaaaagttgaactaataactagtccaactttgtgtatcaatatttaattattaaccaaattaaggttgcattctgttaatcaatcttgggaatggaattgcttcacgaatgtggtcaaggtgacaaacccaagcaatagtacgttcaaagcccataccgaaacctgagtgaggaactccaccaaatttacgtaagtcaaggtaccattggtagtcttctaaattcaaaccagcgtcaagaatttgttgcttaaggatttcgtaatttccttcacgttctgagccaccaaaaatttcaccataaccttctggtgcaattacatcagcacataagtattccttaggattatcaggattcttcttcatatagaatggcttaattgaggttggatagttgacaatgaagactggacgatcatattgttctgaaatatagccttcatctggagcaccaaagtcatcgccccacttaatatcacgtccagcatctcgaagcattttaattgcatcatcgtatggaagacgaacgaagttaccttcagtagttgggcgaagtttttcaggatctctaccaagaatcttaagttcatattcattattttctagaacttgcttcaccatgtaggcaagatatctttcttgaatatctaacgattcatcttgatgcatccaagccatttctggttccatcatccagaattcagtcatgtgacgacgaccctttgattcttctgctctaaaagttggaccaaaagtaaagatcttaccataagccatagcaccggcttcaccatacaattgacctgattgtgaaagatatgcatcgtggtcaaagtattctacatggaataattgagtagtaccttctggagctgaatgcataaagataggtgcatcaaatttgataaagccttctttttcaaagaaatctacagtagccttaaacatggtatttctaatttgcataatagcaaatggtttctttgatcttaaccataagtggcggtgatcaagtaagaagtcaacaccatgttccttattaccaattgggtaaccttcattgtttgaaaccacttttaaatcagtgatttgaatttcataaccaaagtgtgaacgtgcgtcttcatgaacagtaccagtaatgtaaaaacttgcttcttgtctaagtgacttagcagcatcaaatacttcttctgatacatcattcttacgtactaccccttggaaaaatgcagtaccatcacgtaattgcaaaaagataatctttccgcttgatcgtttatctgttaaccaaacatgcatcttgacttcttcatcaacatgtttagaagaatctttaattgaaatcaattctgtcataaaatcctatccaccttttcatcaattatacagtttccataataccaaagtttctataaattatcgacttctgagatatcatttccatttttgaattcatataaagtataacctagattgccgttttgttttttgtaggccacttcccaaacgacctcacccttataccaaccaagattaatattatttattgtagcatccgtatggatagatttaaacttatttttaatcttagattcagtgattcctttggccgcaggatatagatatgcctttttagaatttggcaaataaataaagtaatattgttttcccttattattggtgcctgctatagcatagctgctagtgccgcgatctaaatgataatagttttgaatctttctaattggtgttttactagtagccaattgcgtaactttttgatcattgccccgacttctagatccagcataataaaagatagcaatgctggctagaaaggcaactattatcaaaccaattacccaactcacaaacttgattgtttgtcttgtatcatcttgtaacataattatttattttctaatttcttttttaattcttctctagtaaccttttcaactttgacaggaatcgtttgaaggaactcttgaccataatctttagtccataatcttgggtctaaaattacaaattgaccatgatcctgttctcctctaattaaacggcccattccttgtctaaaacgaatgacagctcttggtaaactatctttagtaaaagaatcgattccctgatcttccaatttcttctgccttaaacgaacttcaggttgatcaggagattcaaacgggatttttgacgcaaaaacagtatcaatcccacaatcatgaaaatcaattccctcccaaaaactatcagcaccaattataattgactttttagcaattacaaacctcttagcaattcggttattggaaccagacaatccctgggctaagatttcaaaatcttttagctgtggctcattcataatcatggtaaaaacagttttaattttttctaaattagtcatcaaaacaagtacatggtgcttatcttgaatgtcactaagtaaaatttgtgcaatagtcttttcaaattcttcactatcagggctaggcatattattaactgccagtacctgtaaatgcttttttatattaaaagtacttttaccaatatattcaaccggatgtaattctgttaaagctaactggttgattgcatattcaaaatttcgattactggttaaagtagcactgacgaaggcaatatggtcaaaacgactatagatttgttttaatacttcaccagcatcaagcattaaccagtctaaattggtacttagtggatcatcaagattagtaatcatcaaaataaagccatcttgctctaaacctttttgatcagaaagcaaatcagccaattgatagcccttttcagagtaataatctaggcgatcaatttgttccgtaatctcattgactaatacctcaacattagccagcatgcgttcttgttcattatataattcaaataaaacctgattagttaagtccctaacctcttctaatttttgttggaacttaggtaaaatcgctttaaacttgctatttccgccaaataaactttttccttgaaaactaagttctagattaccattagctaaaactgtccgattaacagcattatctctttgaaaataaagttgcttttgtaattcattaattaactgaattaattccaaaattttaggatctattttctttagtaaaaggttcagctgcacatcatcattaaattgcgcttcaacactttcatctgagaaataaagcaaattacggagatgacttaaaactccccacaaagcttcaaaacgcaaagaatcattacgcgaacttacgacattgtctgtgaaacgatgagcttcatcaatgactaaatacggattctgaccccaaattgtatccatatagtggttagccaaataagcatgattagtcaccaatatatccgcttcttcttgtcgtttacgcgctaaattccaaaaatcgacccctgcaaaacggctacctactcttgcatcccctggatgttgaatctgtgcaaagagtggtgcattatagttagttaaatttaattcatctaaatcaccagttttagtcttagtcagccaaaccagtatctgcatctgtaatatcaaggtttgcttattcggtgtaccttgaaaaatcgtctgtacaaatccgtcaaggtcaaggtaacgactacttgacttaactacttctgcagtcaaatccaacttaatcaccttaaataactgcggaatttcatgttcaatcacttgttcttgcaacactttagttggtgtagctacaactaattttctaccagaataaagctgataagcataagcaaaaagataagaaaaagttttcccagtcccgttaggtgcttcaattagcatcgcccttttatctggatcattaataaactgatgcaaatgattaattaggtcgacttgagctctacgaaagtgtaaatgatctttaaatagcttttgtttctctgagtcagtctttgggaatttagcattcccaccatgtgcttcagaattatcattttgtttttgcagaataatattacgcacttgcatatattctttacctaaaggccgtttttcttgacgtaaattatctgcaatcgttgtaatcacccaagaggtatcccgaataagcccatgagataatgaactgagggtattcagtgtagcttgaggtagactttctaatttattaaaaatttcaagcaataaaactgcagtcccataagcatcagaatctgccttatgtggatctaaatgtttaatccccaattgtgttgtcaaatcactcaacttataagatggaaaagtcggaaaagcaatcttagccagttctacagtatcaattgctttatttgtaagtgcctcataaccatgttgcactagttcataattcaaaaaaggcaaatcaaagtcaacattatgagctacgaaaacagtattttgcaaaattttagtaattttgggtgcataataatcaaaatctctttgttttgctacatcttgatcatgaattccggttaaattaacaactgattgtggtatttcacgatgcggattgatcaaaaatgaataagttttaactaccttgagatttttaataatagcacacccaaactgaataatatgatgcccattctcacgttgcgttcctgtagtctctagatcaactacagcaaatgtatctttagtaaaactttttgccataatttcctccttcctctatttcacttcaaccgcttgtttagcatcaagcagaattaaatattttccaataacttttttttgactaaattcattgatagcttgttcatatagtctaagctgacctgtatatttttctttaatcaattcaattgattcagataaatgcgattgatcaacgtggtcagttttgtagtcaaacaaaataataccatcatttttgacaaaatagccatcaattgtaccatgaaccaaaattttggcattaggatctgaaaagtttttaaacaaagttttagcggagattaaactagaaaaatctatttctcgctttaaattctctggcttttgccaaaattcctcggcaaaattgctatgaacaaaccactcaatttggtctttctttaaactagaaacaatttctggattcagtttcttttgcttaatcaattcttgaatttctacttctagttgatcttcagcaccattgccttgataatcataatactgcaaaatcatgtgtgtagcagttccgatttctgcaccagtaaacttagtttgatacaagaaattaggtttagtatcaatcggttgtaaataacgattagtcgatgtcaataagtgggcattctctaattcggtctcgatcggatcgttgaatgctttttttatttcagataccgcttggtaagctgtagtttcactagcatctttaaacggataattaaattgataaagccgtttagtggtttgatttaaaaggttactttgcgttttatcattacttgtctccgctttctgataatcaggtagttcaccgttagcattttcataattaatatataaaaacgactgactcttatccaacgaattagtaatatcagacattttcacagctaggtgtcgatctaaagccaacgcaggtcccataaaactcaatggactagtggaagataacttatctgctaatgataattgaccaatctgatttagttcagtcgaccattctttaactcgtttatccagattaggaacatcgccaaccaaaattaatttctgcttagcccgcgttaatgctacataaagaattcgcgcttcttcttctaataattgcctttttttagttacatttcccatcgctttaactaaagagtcaatccgataatgttcttcacggagcgtaattcctatactatctgagctaatcacatagttaccttttaaatcacgcatttgatatttatgctgcatccccacataaaacacgatcggaaattctagtcccttagaaccatgaatagtcattaatctgaccgcattaccagcttctttagttaataaaggctgtgccaagtccttctgactttgccgcatccgattaataaaattgataaattggtataatcccttgaaccctgcactctcatatgaagcagcacgttcatataaagcttctagattaactcgtcgctgttcaccattaggtagtgcggtcattatctctaataaatttgtcctagcataaatgctccaaatcaattcagaaatacgatgtgccgtggcaaacttgcgcaaatcagctagttgatttaaaaaatctttgattcgagtacttaattcatctcctacacctacataagaagtcaatgcactatagaaagtagagttcttactcttgatacgaattttagctaaatccttttcaccaaaattaaacaaaggcgaacgtaaaactgaaactaatggaatatcctgatcgggattatcaatgatctttaagtagttcatcataacagtcaattcaaaagtttgaaaataattcttcgcatcagttacaaataatggtatatcctgcttagcaaattcctgcattatttccaaattatcactacgacttctagtcaagatagcaatatcactgtaacgtaactctctcattcctgttttactatcaaagatttgtacacgctcttcttttagttgcttaatacgtgctaaaaccatttgaatttcagaaaaatctatctcattttcatcttcattactgctatttttcttttcatgaacaattacttcactagctttaggagtgttttcaggataatacttagcaccaaaaattaattgtccttctttttgatagtcaatcccgccaaaatctgaacttagcacacttttaaatacttgatttacaattttggtaaccggctcagtagagcggaaattatctgacaacagaattcttttggtttgtttattatcatcattggcaaaatcatggtattttttcaaaaataagcttggctctgcttgtctaaagccatagatcgactgctttacatcaccaaccatgaaaagcgtatttttatctttatttttgatttgctggatgatattttcttgcaaagcattaatatcctgatattcatcaatcaaaatctctttgaatttattttgataaaattcacgagccatttgagaattcgatgtatcttgactcaaaatctgataagccaattgttccatatcactatagtcaagcaaattttcactgcgcttcagcttattaaaccgatcaatcaaggctagctcggatttagcaattgcagcaacaatcttttggccgcgctgcatgactttaatttgttcttgttcatcaacagcaaaaaatgaagtaaaagtatcaaaaaccaaattttttgcttcatcttttaacttttgtaggtcttcataaaaatttagaacatcttcatcccatttacttgacttacgataattcgctgtaaaaacacacgaacgtaatagttttcgttgtttatcgtagtctgcatcattttctaaagcaaaaacaaaatgatctaaattttgtgcaaacaaggtaaaagcttccttagccttagctagctcttttgtttctattactggattttctaaataatcattaattttcccttgtaagtcgccaatactagtaagcaagtatggcttaatctgtttttgccacaaatcagattccacgatactgccattaaccacgtaaacatcaaccaatttttttaaccatgagcgatactcaggtttggccatggcaaaatcatacaaatccagcaacaagtcgcgcggactatccgcatctctatcccctgcaaagttatcataaaaatgcctaaaatttacgtctttcttttctagaaactccccttcaatttcacgtaatgcacgttcttttaacaatgcagcttgagtatcatcagttagaatactaaaacttggatctaagtttacagagtaataaaagcgatggattacttctagacaaaatgcatcaattgtagaaatattagcagtatccacttgatttagctgctcacgtaaatatctgcgattagatcccggctttgctaattcagctgataatgcctgtttaattctagttttcatttcttcagctgctgctttggtaaatgtaattactaataattcatcaacttgggttcccgaaagaatctcccttaaaacgcgctcaacaagaacagttgtcttaccactacccgcagaagcagaaaccagaatatcatgaccacgatcatcaattgcttgttgttgctctttagtaaattgagacaattttattgttcctttcctaatttctctttgattttaagaattaattcttttttattcagattgtttatttcatgatattgattttgacgcagcatcgcatcaaaaaagaagacatcacgataatcagaataagttaaggcattcttcgctttgccataacgatatggattaagttcaatttttccagataaaatttggcttgatgcttgtcgaataagatactcatcgtattctagcagtaattcaatttcttcctcactaaagttgcggtcacgtggcaagctaaagccacctctagccttagttttaaccccagtatacagttcagaagaatagctaggatgatcatcaagtaatggctcagcttctactaagatttctggatcattgctgattaagccagtatacatcagcttgggcttactatcagttgctccctttttcaaatttaaactactatcaattagtttattgctattcaaacgttctaattgtctagtaacagtttgataaaaagcacccaataatgaaagacgatcttttccagcaaaaaattgatcatttttagtcaaaacatccaaataagaaaccatctgtaaagcaattccgttataaaacatcccaagatcaaattttttagctgatgacttgtaatcaataacctgggctaaaacttgatccttatcattgaaattggccaaatcaacccggtccattttaccgcgcaaatcaactttatgttgacctgatatatctggcacttttaagcttaatcctttgattttttcacctaacccaaaacttaattcagaatacttagcccgtaacggggtttccttcaaggagcgccgccaattatgagctaccttagaagtagtatggtctagacacttgaaaagatattgattaaaaggatcattcattaattgagaatattttccttcatccttcatcacatttcgcaccgaattaagcatttgttccagttctatgctgcttaaatctgctaagtcggtatgctgcttgtttagttttttcactaaacggtcaaaagtctcgtgaaaatagtttccagcctgaataacatcaaattcattttcaaaccgtcgccgcagcttaagcccataattcaagaaatattcatatgaattttcataaaaagtttccagttgtgacacagatgaattcaagttttgaccatacaattgactagccaagtcctgaccaatattttctggctggttatcaaaatcacttgcttcaagcactgtcttcgttttttgaggtagttgctcctgtgtgatttttaataactcttgcacagcaagacctgaatttattgaattcatataggttaaatagcctaaacttgcatcagggttagtaatgaaagacaaaagatcctgcatcttttctggcaaatcatgttgaacaaattgctgagcaccataatcctttaaacgttgataataaattgaaggatcaagctcttcatttgaagcattaagtactggataagatacatataccctatcttgtgctaaagctagcgacaaaccaaactgataattttggtctaagttattaagctgttgactatcttctaagtaagattctgaattaaaactattttgtagctgattcaagttttcagtagttaaaaaacctggcattttctgaatttggggtaaattattagcagtagcgccaatgataaacacttgcttatagccgctagtttgtaccatccccatttcagaaaggtttaccgcatcaagtgttgaaggaatttgggaaaaatttgcttctcggaaagcgctaattaacatattaaagaattcatttaaatcaaaagtttcaggattaattgctaaatagtcttgcaacagctgcattaataaatcccataattgctctggttgctgcgcctgctgtaaatcaccggcttcattggcctcatcacgccatttttctaatcggtcggcaattccgttcttagttaagaactcaaaaaatatcgttaacgccttttgactatctttttcttgctctattattttgaaaaatgttgaaatcttatcaaccaagtagctgcgcaaacgatcgatcttagctacttcatcatccattttgtctaagcggatcacttcagcattcacaaaattatcaaagtgttttttccataaattatgattaataccatgagccagaacaaaattctctagttcatcaacatcatgaatatactccgcctcttccttataccaagaaggtattaacaagtgtgtctttaggatggctagcatattttgtgtttgaaacggattctcatgtaagttaaataagctttcaattaaaacaaccagaggatgatacttcatttcctgttgtaaatcattaaaaaatggaatctgattttgacgtaaaattggcgtcaaataagtctcgtattcctttaaatttggagctaaaatcaaaaaatcatgatagcgatagttgcttagtgctacctgttgataaatagtccgcgctacaaaataagcctctgcatatcgagagtctgctttaactaattgtacctgcttcaattcgtcaactttaggaattgtctccgtccaaagactatttaatatttcacgaccatttgattgcgaattaagcggaaaagttgctgtcacgtagtccatctttctctcttgtaagaacagcgttaagcgcttaatagtttgctggattacataatcataatctccttcttccgcactagaattaatttcacctaagcgcgttttaaatgcaaggattacatcttttgctttacgcatcaaaattttaatcgttagtgtttcctgtaatgaaaaatgtgaaaaatcacagaaataaaaactggcttgctttaaatttttacttttagctaaaatttcatttagttgcagctgaacctcattcttagtagagaatttacccgcaatttctttaataaaggcatcatagataatccgcaaatcatgtaatttatttttagtttcttgatctaaattatcctctgatatctcgtctaaatctaaatttccgtcatagacttgcaaaattgtctgataaagctgatttactaatccagaattaacattaacattttccaaaatagtcaattcatcttttttgttctcaataatatgagctaagagcattgcactagctgcatcatctagttgattaggcaatccttgctcggcatcttttaagaaaaaccaagctaaacgcgaaaaagacaaaacatgcaaatttttaactgcagtctcagtttgttgtttgcttgttgctaatttgttaattgccctaacttctgtggtaaacttaatatgattaggaacgatgataaaagtttcttgttctgggtgttgctgatagttttcaactgcttcttccagaattttttcttgtaatgggtcggtttgtcgtcctgtaagaattttgatcatttgttcgcactccttgctttttattttatcatagcaagggcaatcttttgtataaatctagtttaaggatgattaaaaatgaaaagcagctatttagctcatggcaaggtaattattattggggagcattcagtagtttatggatatgatgctttagctatgccaattaaggctttacacattaaaactactgttgaatctgcttctcaaatgtggatggataccgctcgctaccacggtccattatttgaagcaccggcagaatatgatggcctaaaatacgtagttaaacatatgcaaaaaaaggctggcaataaccatccacttaaaattacatacactggtgaaattccaatggaacatggttttggttcaagtgctactgttgcattaggtaccactagggcaatgaaccaattctttcagctgaatatgactgaaaaagaaattatgactgtaactaatcatgctgaaatgatcaatcatggtaaagcttctggtcttgatgcagccactgttaattcagattatctagttttttttaataaaaaaatggggcctaaaatattacaaaccaaattaggagctaccctgttaatcatggatactggtcaactaggcaatacaaaggaagctgtttttttagttaaaaaaatgcttgaaaagtccgactatgccaagaaaaaaatagctcgcttgggtgaattagcggatcttactaaaaaagcttggatcaagcacgatcgtcaagcagttggacagatttttaatgaagcacaagaaattttgcactcatttgatctttcaacaaataaaattgaccaactgcaaaaaattgccttgtcaaataacgctttaggctttaaattatcaggcggaggtcttggcggcattactatttccttgtgcgataacgaaactgtcgcccaagaaattgcctctaaatgtaaagatttaattagtgactactggattgaggagatttaatgaatagaaccgcacgagcacatacaaacattgctttaatcaagtactggggcaaagctgacgacaaattacgtcttcctttaatgtctagtttatcaatgactttagatgctttttatactgatactagcgttgaaaaaacagatggtgaaaatcaatttttcttaaataatcaacagcaaactgctgcagctagtcaacgtgtttttgcttatctaaaaaaattgcaggctcgttttcacgtcactggcaatttaatcgttaaatctgtcaatcacgtccctacttctgcaggattagcatcatctagttctgcttttgcggcactagctgctgctttttgtcaatgctatgacatcaacattgatctagaagatttatctcgtttagccaggattggatctggttctgccagccgctccgtttatggcggttttgctgtttggcaaaaaggtaatagcgacgaaacatcttacgcatatgcactagatgaaacaccaacgatggatcttcaccttttagcagttgaattaaataccaaacaaaaaaagatttcttcgacttatggtatgaaagatgcccaatcttctccatttttcaggccctggcttgaacgcaacaattcagaattaaatgaaatgatcaaagctataaaaagtaatgatttcactgccctaggccagttagctgagttaaatgcaaatgaaatgcatgcaattaatttaactgcacagcctgaattcacttactttgagccgcaaaccattcaagctattaaattagttgaacaacttcgtactgaaggaattgaatgttactatacaattgatgcaggaccaaatattaaggtactttgccaattaagaaatagcaaagatatcattcaacgcttttcgtccgaatttaataatgttaatatagtgaatgcaagttttggtcctggaattacttatttggactagttgtaattaaaaaagttaattagattcgaggatttagttcttttgataacagaaaaagcgcccggaaagttatatattgccggagaatatgcagtattagagcaagattgtcctgctattttagtagcagttaaccaatttgtacgtgtgtcaatcactaagagtaaaggggcaactggcttaattcactccaagcaatactcacaggattcgattcattgggttcgtcagggctcaaaaatggtaatcgataatcgtgacaacccttttgaatatattttgtcagctatttcatttactgaacaatattgtattgagcaaaatatcaagatgaaagtctatgatttacacgtcaattcagacttagattctgcagatggtaaaaaatatggtttaggttcaagtgcagccgtcacagtagctacagttaaagctatcttgcgtttttatggcgtaaaaatgagcaatgaactggtttataaattatcggctatttcacactattcagttcaaggaaatggctcagctggtgacattgcagctagtgtctatggcggctggttagcttaccaaacttttgacaaaaaatggttaaagcaagaattagctaataagactttagttcaagtcgttaatgaagcttggcctggcttaaaagttgaattactaactcctcctaaagatatgaaactgatgattggttggagtcaaaagccagcatcaacttcacgcctcgttgatgaaactaacgctaataaggcggctttgaatatggaatataaaaatttcttagcagcttctagagcttgtgttttaaagatggttcaaggtttcgaagcaaacaatattgctttaatcaaacaacaaattcgggctaaccgtaaattgttgcagcactttgccaaaattaaccaaattgccattgaaattccacgtttatcgcaattaatcaaaattgcagaaaattttggtggagctgctaaaacttctggtgctggtaatggtgactgtggcattgtgattacagatgctaataccgatgttgaagcacttgaaagcgaatggcgccataatggaattatgcctcttaattttaaggttcaccagattatcatggctcattgatggagagttctatgtcgattagatctgaaagaaaagaagaacatctgaagttagctcagatgttttttaataaagaaaaatataatagttttgatcaactgcatttgttgcgccctgctctgcctgaaacaaaagtcgatccaactattctgggatcagaaatgtttggcaaaaatgtttctgcgcctttttttatcaatgctatgactggtggctcagctgcttctaaacaaattaatcaagcattgggacaggttgcccagcagcaaaatattgccctagctttgggatctgccagcattttagctaaggaaactgatcaactagacagttttatggttgccagagcagaagatccagatggtgtactaattgttaatgttaatccagaaacaccaatctctgcaattaaacaaattatccaagaattaaatgcagatgcgcttcagatccatttaaatacaatacaagaaattgccatgcctgaaggtgatcgtgactttcgttggcttgattcaattaaagcaattcgtaccgctatcgatttgcccattattattaaagaagtcggttttggattggatcaaacaagtattcatcttttaaaagtaaatggcattgaatacttcgatgtcgccggttcgggtggcacaaactttgcccagattgagaatgcacgtaatgccagtgacgtttcatacttagaagatttaggtttacctactgtggtgactgctctgatggcatggcaagagcaagttaaattttatgtttctggtggagtacgtaatcccctagatattttaaaaggtttagctctaggaggaaaatttgttggtatttcaaatgtttttttacaagaatacatccaaaatggtagtactggattagagcaattaattactaattggaaaaatgaattggctgctttaattgctgtttacggcaaaaaagatttagcatccctggtacaaataaaaaaatactataatttaccattaaaggctcaaatcgatcagttactgtaaagtaaaagcactagttaatgattactagtgcttttactttacataattttccttatttaatttcaagcaatttagcaatttctttttgaacagcactttcattacttgaaccaataatttgccctgcagcttgtttggcttctggcaacgccgttgcagtagcaaaactacggcctacatatttcagcattcctacatcattaccgctatcgccaaaagctatcatctcacttgatttgatccctaatttttgactcaaatatgctagacctactgccttattcattcccttagtttgcatatcaatcgagtctgctgcaccagaaacaaaaccaacctccggatatttttcttttaattcgcgcaaaattttagacattttatcttctggcactgtcagactgaccttgaaaatctgatcatcaatttctccaaaagaatctactacagtaatatgctccatgtattttttcatttcttgtttataagctcgtccactgctctttttaacataagcacttactagccccatcactacagctggatacggatattcagtagttatttttaataaagtttgatatatgtcatcacttaacgagtcaacatgcaaaatttgtcttccttgagcaactaatgccccattttcagctacaaaataaattttatccaaaacctcaggaaaacgagtcattaagttagcatattgattgccactagcaactacaaatttaatcccctgcttttgcatttccgcaaattcacgcaaaaataattctttatcatagtctttctggtcagttaaccaggttccgtccatatctgtcgcaattagttttatcattttctcaatccctttgggtaaaagttcttcaatacttgattaccagcgattttgccaaaactaaatattaatttttgatagctgactaacacaaagccccgcaaatcactgtccactttaacggtttcaccgtgcaaataattttggtattcttcaattgtcggtaaatcataaacccgttcttgctttaccttacctagcacttctgccaattgatgtcctggttcaaaacgttttttctttaatatacccaactcgactccattattaattacatgaagcttacttttttcaggcaaactgattgcaggaatatagacatgttcattacggacttttgctttattacgccagtcacttaaagcaactggtaaattaaactgatccattacctgaccaactagttcctgatcatttttggttaagcgccacggatcacgcttggcttttttgtttttgctctttttttcaattctagctttacctactttttgtaaaactgccacaaattgtccttcacctataccatcttgaggccaaaagcgtaatgttttagtcaaatcaggatttccatcagcccactcaggctgtccaacatcaatcttattagtttgtatccctgtatctaaaattgtaaaaccatattctttatttaaccagctaacaatctgctcatcctcttctggtgcaaaggtacaagttgaataaattaagcgtccgccaggttgaagcatcttaacagcttcattgaggatctctttttgacggttctggcatgttaaaacatagtcttgagaccaataatcaattgcctccggattttttctaaacattccttcaccactacatggagcatcgactaaaatcacatcaaaaaattccgaaaaaattggaactaacttttctggactttcattagtaattaaggcattactgatgccccaacgttcaatattttcccgtagtgcctttactcgtgttgcagagatttcattagctactaaaaggccctcacccttcaattgttctcctaatgctgttgtttttcctccaggcgcagcacacagatctagcacgcgctctcctggccgaacaccactaattgccgcaggaaacatagccgctggatcttgagaataaacactaccgcttacccactcaggatcttcccccgatacttcaccataataggctgaatttatttgcggtactgaatcagtaagctcatatgaaaccttagtaggcttcaatgtattaattctaaaagcttttttgctctcttcattcatcgccgcaaatagttcttgtgcttttttggtacctaataatttttcatatttagttttaaattcatttggtagatttagcaattttcctgtcctttctcactaagtaatagaccatcccacaaaacgccaatacaattacaacccaggaagctattaatgtaactattaaagaaccatatgttgaataaaaggcatgccatcttaaaaagaagtatgtagcaagggcaaaaatagcctctattaaaaataaacgtacgctgcggttaattacccaattgcgcagcaaatcatcgtgtagacgtgttaaacgagcctgacgcttaattcctattgcaagcaacatatttgtgatcattccgaccaataggcaaacaactaacattaaaatatccggcacgacagataaacgatctcgatgatgctcttgaacaaaagacggaatatgcaaactagcatgataatgcttagcaatcttttcaatcactgcaggtgttgcatctactacaattcgataattcttgagctggtctttagcagttggctgatcaattcctgtacttagataatatttatccatttctacctgtggatagtccttaaattcgcctataacagaataataatttttgcctaaaataacatatttattattctgcacatctaataaattaagtttaactgttggccccagcaccacaaaagaaacctgtcctttaaaatcatcaggcgaaaaatagcgaccactctcagttggcaagccagtaacggcatgattagcccaaacaagcacttgttttttttcataattattatctagatgcagttgaatttgatgattcgcataatttttgtccaaatattttaggaaagtactaatcttatcatcactatctgttctaaaatagcgggtattattagttaagccgtgtgcttccagcaattcgtcagcataattagattcaatattggagagcattgttccaattcctaaaaaagataataaaagaatcagtaacaaaaatatctttttaaaattcattttttatttcaaatacctgttcattaataaaatcgaagctttgcaaggaatgattaatctcgtctaaagctgcactatttttaaaccaattttggtgccaaaattctggtgaattagtagcaccatctttttcaccaacaaagagcaaatgacaacttggattatacttatgccaagctgccacagtttctaaatctccgtgaccgaaatttggtgaccacgaacatagaactagattaactgtgtgatacttcttaattgcttggtcagctggtaaatcttctactggataaaaaggcttagctccagtggtcgacgtcttggcccactctaatgagtctgtactgtgaactttaattccaacctgagtcaaagcttgagaccaatacgcgttgcctgccatgatttctaacgctgtttgtacatgcagcttatttttaattaactgcgcagtctgaatattaggcagagaccagatgccatatattaaagagagatattgccgaaaattattaagtaaattatttaaatcccttaaggccccttctttatctggtcccacctcaactaaaacttcttcaaattcatctggcaataaacctaatctgcgtggtgcccgcttcaatggcttacctgcttgtacataactatcaattaatgctatttcttcaacttgtcgtttaaccgcagtatgatttatctcttgctctaattttgttaatttcgtcaaaaattttgtcatacttaaacaccttaatatgattttaccattcaacggcggagaattcagttataataagactagcaagcaaaggagatattctatggttgaaaccaaaaagagaaatgatgatgaaagcattggccgctttgttttagacataattattatgtttgcaattttgatgggaatttactactttatttttagttttttcctatcaaatgaaacagtatctggtccatcaatgcagcccacatttgagaatggcgatcgtttgattgctgtacgtcattttacgcctaaacgaaatgatatcgtcattctaaaagcaccagaccaaaaaggtgctctgtatatcaagcgaattattggtacacctggtgatatggttacttctaaaaatgataagctttacattaacggcaaacaaattgcagaaccatatttaaataatggctaccaaagaaagtcacataaattaggtgaactctatactaacaatttcactttaaaaaagcgagtacctaaggatagttacttcgtcatgggagatcaccgcgatgtttccaaagattcacgttacttcggttttgttaagcgcagcgcattagttggccgagtcgtcttcaggtattggccatttacgcaatggaaaacattttaatcaatgaaattgcaaaaaattttattttttattccaatttgattaaaattagagggtaaggagaaattattatgaatgagcaagaagaattatctgatgcaattatcaattttcaagtaaaacaccatgttaatgacactgacctagcctttgctagtcacctctcagttgaaaaagttcacgccatgaaagttggcgatggacaattcacagccgaagaagtaaatcagctttatgattacatgtcagcaaatgcttagttaactacaaaaaagagcttcatttcttgattgaaatgaagctctttttttgcattaattaatctatttttggttcaagatatttcttcacgaatactagattcaaaataccgaaaacaaggctaacaataaacaagcataaatcatctaaccagattggatcggttgcttgtaaatttggactcttatcaacaaagccctgtaacttagacataaagatcatgccgcagtaagctgcgacaattaccaaaattgcgataattaacaagcgagcccaaactgtactcttaaacggcaagaaatcagtaattactcgcgaactaaaattggcaaagctgacaaagaagtaaatgattaaaattatcaaaatgataaacaaccaatgaaaagcaagcattcgattgctagttatttcaacgccgggaactgttttaattggatacagaccaaactcacgaaatgcttgagcaaaactgtctgccccgcaactagggatcagcaacagactattaacgatttcttgcagcaagaagaaataaccacatgccagcaaactgctaaatatattagctaagtatgtttttcgttcatcgctagctgctaaatgccaggtttgactcagattaattttttcattttgccaacatgtaatcgcacaaaaggcaaaatcaatgtataaagtcacatagacaaaattattgcgccagaattgccctaaatttttagacggcagatttgctagaccattccaatttttgaaaagaagaaaataacctgataaaaatactacagcaaagatattaattaagaaaaccaaataaataaattttcttttttgcgtccacatttgcctaaacaaggtccaaaaattcgtcactatctacccctccccttcaattaacgattaattatcttaggttcgacaaatttactcattaagtagctgtcgattgctcctaaaacaattgctcctgcaaagtactcaaccactgaaatacccaatggatcatatgctgcttctttggcaaaacgatgcaaatacatagcagtaatttgttcgtttagctgttcagcaatcaagattgcaataatcacaatcactgccatcacaaataacttaatgacaatattattgttaactggcaattgatcaacaattactttcgtcaaaaaattagcaaaactgacaaaagtcataataactaaaaccgttccagttaagaacaatagaaattcaattaataaactagcatctgcccaagtaactttagcatcaactaagtcatgaagcagtgaataatgatgacttaaattatcaatcatagcagcaacgaagcctaaaatgacttgaattacaaaaatataaatacattcaactaaactagaaagcatattaatcagccagattttgacacttgaagctggagctagctgccaagtttgactgaggttgattttttcattttgccagcaaagcagaccaacaaaaatcacatcggcaatcggcgtttcgagcattcctgcactaagcaaacgatctagccaattactgtccttactaatgttgagataagctaaattgcttttatctaacagagccattaccagcaaaaaaaggactgcaaaaacttgtaataacaaaactaagttagcgtagcgccttttttgcacaaacatttgcttaaacaaggtcttaaaatttgccataaaaaactcctaattctgttttgcttctacgaatttattcaaaagcaagatatcgatcaaagtaatcacaacatcaaagaccaagaattgaagaatcgtagtggcatagttaatatcctggctgttgaccataaaaggactaaactttcctaagactgaaaagataattgttgccgcatggcctaaaatccaaataatcgcaataattacaattactctaataataaaggtccatactttacttgagccacctggcaaaaaatcaataatgctgcggcttgctaggttaagcaaacttacaattgcgtaccaagcatagccaataaaaatgattagcagcaaacttccgagcattgtttgccagtctcttgctgaaagatggatgctagcctgacctattgctttgcgcacatcttgatcagacaacatcggcaaaagggtaacgattatcgtgaccgcttctaaaattcctaaccaaatataagttaaaaatgctgtcccaaaattgctaagcaaaaacttagtatcagttaccggaatcaagcgccaagtttgactgcgattaattttttcattcttgattgaagaaataatccaataaacaaaatcagcgataaatgacgttatcagcatcattactgcaaatacagcgagaaaagcaacaatcacattgacagaactagtatcttttccattaacaaattctggtgtaccattttccgaaacaaaaccaataattgtaaaacataaactagcaaaggcttgaattaagaaaattaaatagactgacttgcttttttcttgaaacattcgattaaacaatgtgttaaaactagtcattattcatcatcctcatctgcataaaaactttcatagtattcttcgattgacttatgcgtttgacgaatgtcatctgctgacttgtgttccaaaacggtatgatcttttacaataaccacttcatcaagcaatgatgaaatttcattgacaaagtgatctgagattaaaatcgttgccttttcatctttccacaaaatgatggaattaataattttctttcgagccattgcatcaatcccaccaaaaggttcatcaagtaaatacaaatctgctttacgagcaaatgttaaagcaataatcaatttttcacgcattcctcgtgataactgactcaacttcatttcaggatctaatttcataaacttacgcagctcatcgaattcattctcatcaaaatcttgaaaaatcgttgcgtaaaatttaaccacttccttgatctttgttgaatcgctgaagccagttaaaccatcagtaaaagacaacttagcctttctttctgcctcttttgttgccccctctaaattaatttcgcctttgtaattcttagctacaccggcaataattcgcatcaaagtggtcttaccagcaccattttcaccaagtaacgcaacaatcttgccaggagctaaattcaagttcacatcttgcaatacttgcttctgatttttcttataacttacatctttaatagctaataaatcattcattctgatccccaccattttttaaataattctctaacgttgaaactaactcgttctttcctattccaaactcttccatattttgaacaaactgttctaattcattattaattaatgactgcttggtttcggataatagtttagtatcttcagtaacaaaattaccttcgccacgtttagtataaagaataccttgactgttcatctgttgtagtgctctttgcacggtattaacattaacggttaattctagagcaagttttctaacagaaggaatcttctcaccagctgttaacttgcctaaagcaatttgacgatacaagtattgttcaatctgaagataaataggaatattatctttaaattccatttactcagctcctattttgtactgtattattaatctattacactaactataatacttactttagtcactttttgcaagggctaagtttaatcactttgtttcacaagttcataaaagttaaaagtacaacaaaaagatagtctataatcctataatgacggtaattataaactatcttttatttttaatagtattagtgcataatttttatttattaactatgtttaccctatttcctaatctatcaataatctcatattagatcagaaatagaattattgatatttttagtcaaaaatgtttcacttacttagctctttcagcatttaattcagccattttgatcatcacgtcaacagctttccacatagactcaagaactgtgtattcataacgaccatgcatgttttcttctccggcaaaaatattaggacatggtaagcccatataagtcaattgtgagccatctgtaccaccacgaaccgggtcttcattgacttcaagaccttctgctttataagcatcgcgcgctaagtcaacgatgtccatatgtttctttaattcatcggccatgttgtaatattggtcccacattttaagtgtaattcgttcagtaccgaattcatcattcattttcttaacgattgacttaaccaaattcttccgctcttcaagcccatcacgttcaaaatcacgaataatgtaatctaagtgagcattatcaacagtaccagcaaaattcattagatggaagaaaccttcgcgtccatcggtatgttctgggcgatcgtgttctggcagttgattatgaaagtcaattccaacttgaattgcattaatcatttgccccttagcaacagctgggtgaacattaactccctgaatatcaagactaaattgtgccgcagagaatgtaccccaatctaacttaccaggagcttcaccatcaacagtaaaagcaaagtcagcaccaaagtcttcaacatcaaagtgttcagcaccagtaccaatttcttcatcgggagtaaaggccaatcgaatcttaccatgcttaatttctggatgattcattaaatattccgcaaaagtcattaattctgacacaccacacttgtcatccccaccaagtaaggtatcacctgaggccgtaataattgtttgtcctttataattcttcaaatgtggaaaaactttaggatcaagataaaactctgaatctcctaattgaattttgctttcgccatcataattttcatgaatctgtggtttaacattttctgaattaaagtctgccgtatcactatgagctaaaaagcccattactggaacatcataatcaacatttgacggaatttcagcgattacactaccagcattttgattgtagtgaatgtcacttaaacctaattcttccaaatctttcataataacattcttttggaagttttcttctctttcagttgatggaaagcgatctgaatgttcgtcagaacgcgaattaactttaacgtactttaaaaatctaggtaacaaattaggatattccatatataactctctttctaattaaaataagtcttgaaatggattagtagaaacctcggaaagctcaattccaacattccagttattttcttcattccactttttaagtcgaccatagaccttgtacttaaatagtttttcagtataatgaccaggatcaacaacagttaaaccagatgaaatcatatcatggcctacatgataataaacatccccagtaataaaagcatctaaatggtcatctaaggctctagtccaatatttaccaccatccccacaaataaatcctacactggtaattggcttttcattgtttgcagtaatcagacgtgccattttaatttgcattttttctttaacataataggcaaaatcataagcagtcattgttctaggtaactttccttttctacccatagcaattccatcatcatccagacaaaatggttcaacatcttgcagacctagttcctctgcttgccaatcagcagatccatcttgggctttatctgaattagtatgaattgaataaacagtaattccattcttgataatattgccatacattgcgttttgtgcattcgcaaaatccaaattttgtgctggtctaaacattacaggatggtgactaacgatgaaatcaacccctttttcaacagcttcttcaactacctggggacgtacatctaaagtagtcattactttggtaacatcagcctccattgatccaatttgcataccaacaggatcaccttgtgaagcaatgttttccggaaaatcttgtcgcaaacgcgcaacaatgtcttttactttggtcatttctccaattcctccttgattaatttaatatcatgatctacttcattgattcgatcttcgtctttttttcttgctttattcaaattaaccaggaatctttgataataagcgagttggccttcccatttctgataaaaaactggattcttttcttgtacaataaaggggccaaaaaagatttccttttcagtcatctcatgcttttcttcagttaagctagccttaattaattcataagtatgcccagcctctgcaattaatttttctgagataatcttataattatgcatcatcagccaattacgtacccctgcttcgcctatattaggttctagtaccagagttttaaattgtgcatctttgctccaagctctatcaagaatatcagtcattaacttgccgcccattccggcaatcacaactgtatcaatctgatcagcatgagtaacggtttctaacccactacctaagcgagtttcaatttgctcggttaacccagctgctgcaatatcatttttagcattttcaagagggccctctgcaacgtcactagcaattgcataatcaattttgccattttttactaattcaattggcaagtatgcatgatcagttccaatatcagccactcgactgccaggatctaccatctttgccaacgtatttaatcttaaattcatgtttcctccataaaagatatggttaaccaaattttagcatatttcatagtcttattttgctactatttgatataatcgtcacagaaagcgggttttttacatgagtagaacagaaaatgtcacattaactaatatgtgcatggttaaaaacaaagatcaggttttagttcttgatcgcaacgatccggtctggccaggacttacttttcctggtggtcatgttgaagcgcatgaatcttttcatgattctgtcgtcagggaagtcaaagaagaaactggattaacgattagtcatcctcaattagttggtgttaaacaattttatgatcacaatgatgaacgttatttagtatttttctacatagctgaacaattttcgggtaccgttaaagaatcagacgaaggtaaactaacctggatgagtgctaaagaattgaaaaagcaaaagttagcttacaattttgatcatgatttaccagtattttttgaacaaacaattagtgaacatatgcttgacggaaagcgagatgagctattttaatgaaaaaaactgaaagtaagtttgcacttttagctgctttaattgctattttagcttttgcctctattcccttatggcaaaacaatctgaatagtttacgaccacaaactcacacggttaagaaaaagaagactgctaaaaagaaaaaagtcgttcatcttacttggggttacccttttaagaagctctatgaaaagaaaatcaaatttaaatctggacaaaagtttggtgaaactgacgtcattcgtcgagtctatcctagcaagagttattttcatgatggctatgacttcggatttagtgaagttggacattcttccgtatatgctgtgcatgcaggaactgtccatcgtgttaaatacgccccaggtttaggactttatatttggattatttccgatgatggctatgttgaagtttaccaggaaggcttcctcagtattactgatatttatgttaaaaaaggtcaaaaagtcaagttgggacaaaaaattggtaaactgaccggctctcacattcatttaggagttactaagacagataaagattacattgataaaaagcatgacaatacgccatgcaaatactattggaaagataatggcacttggttaaatccaatgaaaatcattgaagataatctaagggcagcaggtaaagatccagtccaataaaaaagagctaagtaaaacttagctcttttaatatagataattataattaatccatgaaatcacgtaattgatttgagcgacttggatgacgcaacttacgtaatgccttagcttcaatctgacgaatacgttctctggtaacaccaaataccttgcctacttcttccaaagtacgggtacgaccatcatcaagaccaaaacgcaaacgcaaaacattttcctcacgatcagttaaagtctcaagtacttgttcaagttgttccttcaacatttcgtaagaagcgtgttgttctggactagttgcatccttatcctcaataaagtcgcctaagtgtgaatcatcctcttcgccaataggtgtttctaatgaaacaggttcttgagcaatttttagaatatcacgtactttattggttggcatattcatttctgcaccaatttcttctggtgtaggttcacggcctaagtcctgtaacaattgacgttgtatcctgatcaatttattaattgtttcgaccatgtgaacaggaattctaattgtacgtgcttggtcagcgatcgcacgagtaattgcctgtctaatccaccaagttgcgtaggttgagaacttaaagcctagacgataatcaaacttatcaacagctttcattagtcccatattaccttcttgaatcaaatcaaggaatgacataccacgtcctacataacgcttagcaatagaaactaccaaacgaaggttggcttcggctaattcttgctttgcctcttcatccccggattcaattcttttggcaagagcaatttcttgatcagcagtaagaagtggtacacgaccaatttccttcaaatacatccgcactggatcgttcatgcgtacgcttgatggagcagacatatcctttaattcagccttttcaacatccttttgtttctttaaggctaactttgaaggatcaccgttttcatcaacaatgctaataccattatcttcaaactcttgtactagttgatctacagccttgccttgtaagttataaggcttaatcaaacgagcagtgaaatcttcttcagtgatcgacttatctttctttacgtcttttacgacttgcttaaccatcttatccaaagatagtttttgtgtagtttctttttctgccactaaaaagcctccttattaacctaagatccgttttaatccaataatctcctgagtgattgcaataattccttgtgcatcatttttgcgcttagcatcctgtaattgagcttgaagctcattcagcctggaatagatgttgcgtctttttaatgctagaaccaaagcatcaacttcttgaattgtagaatcttttggcatctgtgccatttcagcatctactattataccttgaagttgctcaggaataaaatctaagaacccatcaatttgtggattttcatgagtttccgcatattttaaccaatcctgtgccagagtttcaaaatcctgattaggaaaatgaaattgcccttctaacatatatttttgagcatcagttgaatgaataaataaatacaagagtctggtctgactaggatttttttcaactactgactgctctgtaggcacgtcttcatcaccaggtaaaggtacgtctatcggataatcaggtgaatttctttgagaattacgtacatgattgcgtgcccgattatttcgccgtctttctttagcaagatttgcctttaacgaagcaatagaaaccccactagacttcgccaatttttcagtatacatatcttgctcaactggattgcgcacttgtgcaatttcttttacggcctcacctaaataagcaatcttttcacggtcattatctaagttatatttttgttccaaccgttttaagaaaaagtcagtcggcgttaaggcacctttgacttcttccagatacttctcagcgccatattttttgacgtattcatcaggatctagtttttctggtaaaactacaattcctaaattaaaattgccatctttattaaacatacgtgcagcacgttcttcggcatggactcctggatcatctccatcataattaataatgatattaggagtaatacgtctcaacaaatatatttggtcatcagttaaactagttcccattgaggcaattcccgatttcacccctgctttatatgctgcaattacatccatataaccttcatatagaactaagtgaccttcaccacgagctgctttctttgcttctgcaaagtggaataatacctttgacttggtaaaaatccccgtttcaggactattcatatacttagcttcggtcttatcatcagaaattcgtctaccagaaaagcctatcgttctcccattttcattatccaatggaaacatcaaacggtcacgaaaacggtcgtataactgcccatccctagcttgaacaaataaaccactttgtgctagatcatcatcttgataacctttactacgtaaataagtaatcaaaacattatcagccttaggtgcatagcctatcttaaaatggtctaatatttcttgatctagttctcgcttttgagcatactgcatcccccgttcaccggctttagtagtcaaaagcacacgatgataaaaatcaacggcatcctgatgcatttgcataagtggatttaatttggtgccactattatgaccatatccattaggcatagcaatatgggcaaactcagctactcgctcgacgctttcgggaaaagttaaatcatccttatacatcaagaatttaaaaacatttccacccttaccacaaccaaagcacttaaaaaactgcttatcagcatttacagtaaacgacggagttttttcttgatgaaaagggcaaagaccaatatagtctttgccttttttctcaagcgaaacgtactgactgataacatcaacaatattgacgttactgcgaacctctgaaataaaatcttcaggaatccgtccagccatatgaatcaccctttttctatctaaattaactacttaataactaacttgcttaagtcacctaaacgatctgctaattcattaactgcatataattgtgctaatcggttattcttgaccttttcgtccttagccatgatcatattagtttcaaagtattgatcaatcactggttgcagttgaacaaaaccttggtagagatcagccaaactttcaatatcttgcaagttttgaacgccagcgtaaagttctttttcactgttatcatcaaagagactttcatcaacagcagtattactcttaaatttagccttctttaagatgttatcaattctagtcaaactctcaactactggcttgaattcttcatcatcatggtgaagttgcaatacagtagctgctgctaaaatttgacttggatcttgttgacttgaagcaagaacagcatcaataatatcatacttgaagtcattcttttgtaagtattgcttgacacgatcacgaatgaagtctgcaatttcctggtcagcatcactcttaggtagcttagctggagttacaccattaagcatactaatgatttctggtaaaacttcgttaaatggtaatgaccacttctcattaagtaagattcttacaataccatatgcataacgacgaagtgcgtatgggtcattagatgatgtaggaatcattcctgcaccaaagaaggttacaattgtatcaattttatcagcaattgataataatgaaccaaccgtagtttcaggaagtggaccttcagcagtggcaggcatgtagtgttccttgattgcaactgaaacttcttcgtcctcacctgcaagacgagcataatgcatgcccattacaccttgaagttctgcaaactcaccaaccatttgggtaactaagtcaaacttgtaaagttcactagcacggtcgaaatccttgactacattctctggtaaatcccaacgcttagctaagtaatcaccaatcatgcgaacacgttgcatcttttcagccattgaaccaatcttatcgtggaatgaaacattcttaagacgatcaacaaaatgactaagtggatacttgcggtcttcatcatagaagaattgagcatcgtccaaacgagcaactaaaactttttcattacctgaaataacattatcaaggtaatctttatttccgttacgaacagcaataaagtgattaattaacttaccagtttcatcatagacttcaaagtatctttgattgtctttcattgaagtaatcagcacttcatcaggaatcttcaaatacttttcatcaaatgaaccagcaaatacagtcggatattctactaaataagtaacttcttctagtaaatcacgatctggtttaacttgccagttgttcttcttaactaattcattcatttgacgaacgatcatatctttacgttcatctgcatcagcaattacaaattgatcttttaatgcatcttcatagtcatcagcattggccaaaacaactgaatcgcctaagaaacgatggccttgagttttacgacctgcagtaatatccaaaatcttaacgggaattacatcactgccaaataatgaaacaagccagtgaattggacgaacaaactcaaaatcatttgaatcccaacgcatcttagtagggaaagtcatcgccttaatgatatcgctcataccaagtaagatatcactagctttcttaccttccttttgaacgtgaacataagcgtattcagtacccttaagttcttcaaaatagatatcgtctgtagtcattccttggccacgagcaaatccttgagcagccttagtccaattaccatcttgatcttgagcaatcttcttagctggaccttttttaacttcatcaatatcgtcttgcttttcagccaaatcttcaaccaaaatagtcaaacgacgtggagttgaaaaagtcttaatatctttaaatttcaagccattttcttttaaaaattttcttgttctgtcagctaattgcttaacgctgcgtggtacaacgtgagctggcatttcttcagtaccaatttcaaataaataatctttagccattttctacccccgcctttttgtcttctgcacttttaagcaatgggaagccacgtttttcacgttcttcgacaaatttgacagcaacttcatgcgcaagatttctaattcttgataaataaccagcacgttcagtaactgaaacagcaccacgagcatcaagcaagttaaaagtatgtgaacacttcaaaatgtaatcatatgctgggtgaaccaagttcttatccaataaacgcttagcagttgcttcataaatatcaaagaattgaagcaattgttcttgatttgattcttcaaatgcatatttagaatgttcatattctggttgcttgaagatatcacgataaagaatgccattaccccattcaagatcaaatactgagttaacatcctgaatatatgacgcaaggcgttcaacaccgtaagtgatttcactcatagttggcttaacatctaattcaccaacaacttggaagtatgtgaattggctaacttccataccgtcaagccatacttcccaaccaacaccagcacaacccatagatgggttagcccagttatcttcaacgaaacgaatatcgtgttccaaaggatcgatacctaaaactttcaaactgtctaggtaatattgttgaatatccttaggagctggcttaataacaacttggaattggtggtgttggaataaccgattagggttttcaccataacgaccatctgcaggtcttctagaaggctctacataacaagctgcccatggttctggaccaactgcacgaagaaaagtgtaaggactcattgtacccgcacccttttcaacatcgtatgaaggcataatcatacaacctttggaggaccagaattgttccagcttaaagatcatattctgaatatttaatttcttatctgccatttcctttaatctcctcctgcgctaggccataaaaaaagcctatgcaaaattttgcataaggacgaaatattatcgcggttccaccctaattcaggaagtatccttcctgctcttaattgaacaatatgactagaggtgccttttcctagatgtcctcacaccgaccgacattcgctgaactagtacttttcttaaatcctcatcatcgtcaaatacgtttttattttaacacatgggtcatggtaaaaccagatttttactaactaaaaagttttaattcatctaaaaatttcttagtctttaaatttaggcctatcgtttcatggtaaatacgatcaatcgcttttctagtagccctcttcgtttcttcattaattttaatatcgcctaatcgctcaatcggtaataagccaattgttctaattacagcagtttcttttggctttaaatgcattcggctagtaactgtactaaaatgatcgctacaaataactccacccattttaatcgaataatcaaaaacgcctttttccttaccacaaataacacaatgctttagctgtggctcaacaccatatgctgctaatattttcatctgcacaatttgtgtaatcatttctgcatcaacgccactatctatttttttcaaagcaaataaagctaaatcataatatttaccaattggctgatattctacaaaggcgtgatcaattaaatcaaaaataaaagaaatataagcgttcttggttaaatcattatataagccatcaaactgccttgcccctttatatgtgcgtaaattacttaagcccttttcgctcgtataaattacgtaagtaccaatagaaaaatttaatgttgctgcacttaatcttgatttaggcctcagggctcctttaacaatcagagtcataatcccatcttgtttagtcataattttggctaataaatctgcttctttatatttctgccttttaaagataataccctgaacttcttttagttcacgtgccatatcatgactcctttagtatttaaaattcattttttatagatattctgatgaagatatcataatatcataaatagtctatagtacaaaaagactgctgtttcagcctccacatacgtggagaataccaagactttacccagaatcaacttcgaaactgggtttcagcctccacatacgtggagaatacagtaaacaaatcccaatataacaacaatcacaaaacaatagatcccaaaatttcatcactttgtcattactattgtatctatttttatcccattagttatccaacgaatagaattttcttgtctccctaaacatacaaaaaagacgtcatctttcgacaacgcttatacaacagtaattcaactaaagttcttttttgtcatagcctattcgctttaaaaagttagggtcagaacgccagttatgttggaccttaacccagagacgcaagttgaccttttcaccaagcaatctttcaatctcttgacgtgaattaatcccaatctgcttgagcatcttaccgcccttaccaataataatgcctttttgaccgtctttctcaacatagatagtcgcttcaatcaagagcttgccattttgatgagtattcatatgatcaactgcgacagcagtagcatgtggtacttcttgtgaagtcagtcgcagaatttgttcacgaattaactcggctaccacaaaatattcaggccgatctgtgatctgatcagcaccataatattgtgggcctactggcaaatattccttaatcgttttaagcagatcttcaatcccaattccttgagtagcagaaatcggtagtatttctttaaagccctcaagtttgtgatatgaatccataattggcaaaagcttattaggatgaatttcatcaactttattaattactaaaagaacaggaacttttacttcttttaacaagttggcaatgtattgatcgcccttacccatttcctcaggttcaaccatgaataaaactaaatcaacgtcattcaaactagatacactagccttatccatatagtcgtcaagttttgaatgaggcttaaaaatacctggcgtatctacaaaaacaacttgcatttcatctgaagtataaatacccgaaatgcgattacgagtcgtttgtggtttattagacgtaatggcaactttttgaccaactaaatagttcattaaagttgattttccaacattgggacgaccaactaaagcaacaaagccagacttaaactctttttcttccattatttacctctgccttcatctaattgatcaggatacaatggcaaaccataatcttctaacacttttccttgaataccaaacatttctttggcctcatccggcttaatgtggtcgtagccgtttaaatgtaaaaagccatggactattgtatatccaaattctcgatcaaaacctgtaccatactctttactgtgacgcttaatcacactaggacacataaatagatcaccgatatcctcttgaaagtctggatcatctgcaaatgctgcaagatcaattgaatcctcaccatcttcaattgcaaaggaaattacatcagtaggacggtctttgtcacgatactttaaattaatttcatgactacgatcttcgtcaacaaagttaatactcatctctaagttgttatctttgccaatttccttcttagctagcagcaaaagtttcataatccagtcttgccagttacgcttttcatcatctaaaaagccaacttcatcattataagtaatatcaattggatccatttttagtgtttaatgtcctctttttcataagcggtaataattttcgcaactacagggtgacgaacaacatcattagcagaaaagttgataaatttaatttggtcgatattcttcaagatatgtctagcatcaattaacccgctatgctgtcgaccaggtaaatcgacctgtgtcatatcaccgtttacgaccatcttagaattaaatccaagtctagttaaaaacatcttcatctgggcatctgtagtgttctgggcttcatcaagaattacaaaagcgtcatctaaagttcgtccacgcatataagcaagtggagcaacttcaattacgcctcgttccatcaaacggtcagtcgtattagtcccaagaatagcatacaaggagtcataaattggtctcaaatatggatcaactttttctttcaagtcaccaggtaaaaatccaagtgattcaccagcttcaacagctggcctagtcaaaatgattcgagaaacttctcccttcttaaaggcggcaattgcacaaactacggctaagaatgttttccccgttccagctggtcctattccaaagacaacatcagatttatcaatagcttcgacataacgcttttgtcccatattcttgactctgataggtctacctttagcatccctaatcaaaacctttttatataggtctgcaaagtactctgtggtacccttgtcagccatcttcatcgcacttactgtgtcgggcgcaccgatgttaacaccagtattcacaacactatcgagtgcctttagaacagcaactaccttcttgatcttctcttcatcgtctcctgcaatgacaatctcattaccgacatctgacacagaaagatcataaccttcagaaagaagctttaaatttccgtcattaactccaactagtttttgaatattttctggtctttgaggtgtaaaagttgtttgagccaaatagacccgctccttcttgttactactaatttagctgatcacgaactgattgcgaagcagccttgccatcggcacgtcccttaatctttggcattaaagctttcattaccttaccaaagtcggacttacctttagcaccaacttcatcaattgtttccttaacagctgctctaagttcatcctgattcatttgcttaggcatgtacttttctacaactgctaattcttttttggtttcttcagctaaatcatcacgattagccttaataaattcgtcaatcgattcttctctttgcttcttttcacgattaagaacagttaattcttcatctggagttaaatcgtgtcctgctttaattttttcattcattaaggccgatttgatcatccggacagtattaagagttgtcttgtcgtgattcttcatagctgatttcatatcagccatgatttgatctgacaaactcatttaatatccttctttctattaaaaacccaatagtattataacaaactatgttcttaactaaaataaaactaacaaatatttacttaacataatcaaaattatgcttcaagaagtcaaaaagaaaagctacccaaaaacaggtagctttctcagtagtttattaataatgtctacgcttacgtgcagcttcagacttcaactttctacgaacactaggtttttcgtagaattcgcgcttgcggtattcttgtaaggtaccacttcttgaaacggaacgcttgaaacgacgaagagcatcatcaatagactcgttttcgtgaacgattgtcttagccatgtgtgatccctccttccatttcttggcgttacgccatacatttacttaaattataccaaactaatctttagggtcaatacaattcaaaaactttttgataaatttttaagttaagtaaaccgactactttaccttaataaaagagctgagtttttattgttaatccgctttcattaatagtataattattttcagaaagatatttaataatacacgaggagcttaatatggtagaaacaaaagaccaaaatgaattaaacattattattatttctgatgcggctggtgacactgcttttagtaacgccacagctgcagctgcagaatttcctaactgcaatatcaactatcgtcgttacccctttatcactaaccaaaagaagttggacgaagttttaacagaaattgaaaaatatccaaacttggtaattatctacagtttggttaaagatgaaatgcaaatgccagttatcaaatttgcccgtgagcataatgttgaatgtgttgacatcttctcacctgtagttgaagcaattcaacaaactactcatatgacaccagatcaaaaaattggtgcacagcatagcttaaatcaaaagtactttgacagaatttccgcaatggaattcgctgtaatgtatgatgatggtaaagatccaaaaggtttcttggaagctgacgttgttttacttggggtatcaagaacttctaagactccactttctttgttcttagccaataagaacttaaaggtagctaatttaccacttgttcctgaaactcacattccaaaagaaatctacgaaattgatcctaagaagattattggcttgactaacgatccatctgtattgaacgaaatcagacgtcaaagaatgatcgcttatggtttgaatcctgatactacttattctaatatggattcaatcaacaaggagcttgaatcagcacaagcactttataagaaattaggttgctatgtaattaatgttgctcaccgctccattgaagaaactgccgcacttattttggagcacttgggtattgatgattacgctaagtaataatagatactaagatcaagtatgtccaaaaatcgttctagagtttctctagagcgatttttatttacagaaaaatatttgtaaatttatgcatattactgttctgactcccatgatctaacaatcatctaaaacagaaaacaggtattccaggcgcgatagtgggatctaaacctcattgatctaacaatcatctaaaactacctcacacctctattatttatttctttagatctaaacctcattgatctaaaaccgtacgttggtaccgccgcaaaagctaatagatctaaacctcattgatctaacaaccatctaaaacgtcttacgcatgtaaacgccgttttcacgggatctaaacctcattgatctaacaatcatctaaaacgtttcccaacaataaaagaagtcgcccattgatctaaacctcattgatctaacaatcatctaaaactataaatccggtccatcgtgaaaagcatttgatctaaacctcattgatctaacaatcatctaaaacctactattgacgtaaatatattgcacaagagatctaaacctcattgatctaacaatcatctaaaacacgtaagcaccttttgaattggagactactgatctaaacctcattgatctaacaatcatctaaaaccgatatttcataatatctttttaatcaattgtctaataccaatcaacaagatctcgatcaatatatgcaacttgagcatccttgactgctaccccatatttcttatctgtgaattcaattaaaataattttcaatttaagttgtctaacaatcttactaagttcttttaactgtgtttcatcaaggtaatgagctacattacaaaacacgggaatactatcaagattatattcttgatgaatcttaagaactgtttcaattatagcatatggtgttaacatgaaactgtcaaatcttttgtgtaaatagatctttctcgtaaattgattttttaattatttatttaatcaaagtaggattctaaggtgtcctgaacctgaccaaagcctttatgaattcgattgaaataacggtcattgtagctcattgcctgaatgccaataaaagcatcaagcgactgttcagttggaaactctgccttaggcttagctttgcgcttgatcacattgttaaatgattcaatcatgttagtcgaataaattgaagctctgatctgcttgggatagttataaaagaccagcagatctggttctatgtctttcaagcttctgataacatgactgtaaaccttgccccatttggtatagaagtcatgcaggacagctgtggcttcttctttgtttgtctgttgatgcacctgtttgaattcgttcatgatcttttcacgatcgtcgacgcgtactttagcgcagatattgcgcatgacatgaaccaaacagcgttgaaaatgagctttaggataagtcctggccaaggctgttttcatgccaacaacaccatcagaaagaaaaagctcaacttgctttaagcctcgggatttcatgttttgaagcatatctgtccagacttcaatgttctcgctaggcgcaatgcagtagtcaatgacctccttgtgcccattaggcttgatgccaatggcaatatagactgcttcacgctcaaatgtttctcggcgcaaaggaaggtatgtcgcatccaaatagacgcagaaaaacttgtcgcttagcttgcgtttgtggtaagcctcaacctttggaatcatctgcttggaaatatttgatacctgagctggactgtaatggctgccatacatcttttcaattagatcggctatttccctggtggtcacgcccttggagtaaagcttgataatcatgctttccaagatatccgagtgctgcttgtagccaggcagcgtgtgctgatgaaattgaccgttgcgatcccgaggcacttgcacttcaattgggccaaattgcgtatcaactttgcggaaataagcaccatttctagagttgccagtattccagccatttctggcatagggatcatagcccagaaaggcggtcaattcagcttctaacaagttattaacagcctgttgtagctctttgcgcaataaatcatttattttgtctggattgaatagagcttgagcaaaatctttggtaaaatcattcatgaaggagttcttctttctgtatgtgtttttttgttcaaaccaatcatacgagaaaggaactcctttttctaatgtttaaagaaataaatttaaggaatcattcatccttacacaaactattttacagtctctatttttgagccaaattaatgtctactatcatttactaaattcaatgtaaacgttattaatttaattctatgtaaatcccaaaataaagtaaagaaatttcaaaaatacctagactcgtaattaaaaacatattcacatatactcatactaactttttgttattaatcgaaatttaattgtaactttctcgtaaaactgctgagctacaatagtttaggtgaattaagagaggagataaaaatcagaacttatctggtttctttttataatgaaatttcgtaaattaataatttctttgttaggtactgcattattaacttcaagcgttggtttatcaaccaccactgcttctgctgatacgcttgatgactcacaaaatacaactgaagttcaacccaagaacctcaagtgggcttatccgtttaaagccaacaagaaaaatggtgttcgtccaatgtataatgcacaaacttttggcataactaactatatgcgttctactacaccaccttcctactttcatgatggttgggattttggtttttcagaagttgggcattctaacgtatatgcaattcatcaaggtactgttaaaaaggttgcttatggcaacggccttggctggttcatctgggttattagtcctgataattacgttgaagtttaccaagaagggtttaataagaaaaaagacatttatgttaagactggtcaaaagattaaattaggtcaaaagatcggtaagctaactggctcacacttacaccttggcgttactcaaacaaataaagattacataaacaaatatggttttccatgtaagaattggaacgttaacaacggaacttggctcaatccaatcgaggttatcaaaagcaacttaaagaaatagttaacataatctaaaatattgaaagtaaaaaagcaggtcacagcttataacagttatgatctgctttttattaatcccaatgttccttgataaacttagctcttccaccagcttcttccattgcatatctaagtggatcttttttataaaaatcttggtgatattcctcagctggataaaatggcttagctggttcaattttagttacgattggtttatcaaatttaccactagcttgtaatctttgcttagatttttcagctgcttctttttgagcaggtgaattataaaaaattacaggtcgataattatcaccacgatcttggaattgccccattgcatctgtgggatcagtcacttgccaataatagtttagcaattgatcatacgatatttttgctggatcaaaggtaatctcaacagcttcagtatggccagtcgtacctgaacagacttgctcatatgttggattagcaacatgaccaccagtataaccagaaactactttttctactccgtcaactgtatcgaaaggttcgaccatgcaccaaaaacaaccgccagcgaagattgctgtgtcgttgttgggttttgccttggtatcagtggttttggcttgtttattattctctgtcattctttgaaatacctccattttatttgaattttattgcttttttaagttaactagtattatatacaaataaaaatgagatgcactttttattacctgatgtatcccattttatttctttacaaattattgcgtctttcttcaatatccttttcaatctgttctaaatcatcttcgatagcaagatttaaaataaagtttttcgtcgttgacctcttattaatgtaaagcttacgggcctcatttttatcattccactttttatttacttctgtatatttagccattaaaaatcactttccataatgctatagcaatcacaatcaaaacaccagttaacaaagctcttttaggatagaactttaatgaccatttagtatttttgccagtatgagttaattttataggctttcggcatatttgtcacctcttagctccgattctcttagcctcctttcactatatacaacacacgcttttacgtgtaacgcgaatgatatttagaaaaatatgccaaaaagggcatcaatctggccgtctaaagccaaatgatgctttaattgttttttcaccaaaatcaatagcctaacttaatgacactgtttttacataaacttattaaatttataattcttcatattttttgctctttaattaatttgttatcaaaattgaatacaacgattagtagctaagtccttcttacgattaccagattaccaattcatctcgattctattttagatttcttagcatcttttcactatataagtgaacgcaatctccgtgcaccatcaacaatatttttaaataatatacaaaaacagtcactctatagaacatatttttcagagcagctatttagcctccacatgtgtggagaatacttaagcctcatcttttggctgatgtaacgacttggatcacctccacatgtgtggagaatactaaacggctgtggcgttgacacagctcaaagtaggatcacctccacactcgtggagaatacactaaatgatccacgatatatcaacatccctcaatcgaaataatatcatttttaatcacttttaacaaagaccaataataaagccataattacaaaaagccactccaaataaaaaagaagcatttctgcttctttttgaatagttttgctcccaaagtgcccctaggattcaaatttcatttataaatccttatatatcaaggtttaagggctatccattaaacgatttcttgctccttgaagcgaccatatactttttcaacttcactaacactcatgaaagcatacggatctgctccttgcacgatttggcgaatatcatacatatcatatcgatcaataatggtaatcaaaactgtcttttcaatatgactgtatgcaccttcagcatcatgcaaaatggtaattcctctatgcatccggttttgaataccatcgataatatgctgtgggtgctgagtaacaatcattacttgcatcttctggtgttgggtataaaccgcatcaattactcgcccattaataaaaatagtcaaggcggaataaagagcacgtggccaaccaaacatgtatcccgcagcagcgataataatcaaattaataaaaatattaaattttccgtaactaatgcccgttttttgcctaattacaataccaataatgtcgagtccaccagttgaaataccgttctttaatgccatcccagttccaataccgttgatcgaagcaccaaaaatcgcacaaaccagtgggtccaggtgcatctgccaaggttgaatagcgtgcatcatgatagaacctagaacaacagcaacgatggtgaagaaagtaaatttatgtcctatcttgaaccaagccaatataaataaaggaaagttcaaaagaaagtacatcattgatgttgataatgtaaacggtagatatctttcacttacagtattaattaattgcgcaaaacccgtgattcctgacgagtacatatgccccggcgtccaaaaaaagttcaaggcaactgcaaccgcaattgaataaaagaaggcagctgacaattttgaaagaaaattgtagcgtcggttgaacttatcaagttgatccatagtttgtcaaatcctttgagcaaatactaatagtaaacacattaattttaacaaaagttttgcttctgaccaatctaaatagacatttttatcacttttgttaatcggagcaaaaaatgatactattcagttaatattaattagtctatccaaatagaaaggtgtctttcatgagttcttactatgaattaatgtggcgtgacgatgaactaacttcttataccactgacaagctgaattttatctacaacgcaatcgatcatcccttgtctgtccgctatagacagttatatcctaatcgattagactggcaaaaagccgtaaacagacacaatgcagctattcaaaaagtcaaagaccttcttattgaaagaaaagatagtcataatatacgtgaagcttggcttaaactgcatcccaatgcacgaactaaagcaaacaatggttttactgttgaacaactagctaataagttcccttacatggcaaaacaacttggtgcctttatggaaattgaaaacatcgaaatcaaatactttgatggagaatttaagcctagatatgacttagatgatttttctgatattttttctgccaattatcccactagtggctttaaacaaagtggcattactcaagaagctttactgaagctctaccctaacatcagtgctaaaaatttagaccaaattttaaaaatggccgactgtgaattagagcaagaaaatggcactgaagttattccttattggtatgctgtcaatgctaaaagaatgctaatcgatggtgatagttttgctgcaacctttgacgactaaaaaactgaccgcttggtcagtctttttattggataatttgaacaccgtgttcatcaggatgtaagattaatgtctcatcttttaaatcatgtttacgtaagcccgacaaaaatccagctacatgtttatcttcaatccacgtcataatcgttgaacctgcgccgctcaaataagttgccaaggcatgttttgaatgagctacctcccgcacttttacaagttctggcactagtttttctcggtaaacttcatggaatacatcttgttccattaattctcctgctttagggtagtcttgagcaaacaaactagcaattaaagtattagcaactgctgagccatgcgtagctacgccaaaagctaattctttaggcaaaactgctctagctgtcttagtttccaaattataatcgggtacataagccaccaacgcatatggaggaagtggtgcttcaactgcatcaaaatgatggttaacttcagcaccaacaaccaagccgcccaaaatagtcggtgcaatattatcaggatgtccctcgattttagctcctaattgaaccttttcttcatctgatagtcccagcttaccaatttgattagccaattcaattccggctgcgatagcacttgaactgctacctaaaccatgagccaatgggatattgcttttaacgcgtaaatgaagcggtggtaaccctggataaactgttagtgcagtcttaacaattaaatttttttcatcatgtggaattcctttcatcacatgatccacctgaaagcgatcggctaagcttaaaacttctacttccaaataaagtgaaacagccatgccaagtgaatcaaagccaggacccaagtttgccgttgaagctggtgctttaataatcattttttcccttcctttactgcaaaatcttatagctagcttttaaatattgatcttgaatcgctaaatcttgtagctgctgtcgactaatattttcggttacaactacaattcttgattgtacttgtttaatctcacgaaccggaatttccaaatcagagagtaatttactcaaatcaaacaaggtctcttctgcttcgaaagataaataataggaatacttcacatcctccgaacttgttaattgcataacatgggagaaattactaaatggctgaccggtggtctttttcactacgttttttatttcagtaatcacatcactcatgactgaattagccgttgcagagctacccgcacctgggcctgtgaatactgctgttcctaggctttggctcttaatttgtaaagcatttagttcatttttaatatgcgccataatcgcattttctggcaacaaacatggagcaacttctacaaataatttaccattaatatttttggcaatcccaatcagcttaatgacatagcctaacttctgagcctgtttaatgtcaaaatcctttagattattaatcccttgaatagtaaaatcatcaatactaatcttagtaccaaaagcaaacttgcttaaaattacaatcttgtatgctgcatccttacctgtaacatcgttagtgggatcagcctccgcaaagcccagctcttgagcatttttcagcgcttcctcgtagcttagtcccttttcccccatttgtgacaaaatataattcgtcgtaccattaataattccttgaatttcggaaataatgtcactggaataagaggtagccaaggtccgcaaaatagggatcccacctgcaacgctagcatcatacattaaatcacactttttacttgcagctaaattaatcaattctgaaccaaaagttgccattaagtctttattggccgtaactacattttttccagcattgattgctgcagtaatatattccttagcaggatgaagcccacctattaattcaactataattttaatttcgggatcttgcaaaatcgaatcgaaatctgtagttagcatcacttcgttagctaaattacgatgtttttctggattacgtactagagctttttcaatgatgatttcttcaccacttgtttgtctaatcttctttttattatttttaattatttttaaaacacctgaaccaactgttcctaatccaagcaatgcaattttgatggccatttgatcttatcctctttttaatgattttcttatttttacgattgtatcataggtgctaatcaaggtacaatagttataatattaatatttcataagataggaagattgtttatgcaatatcgtagtactagaggttcaaaagaaaacactttaactgcacctcaagcaattattcaaggcttggctcaagacggtgggctttacgtgcctgttgcctttcctcaagctaattttaagttagaagatttatccaaactttcctacaagcaaatcgctgccatggttattagcttattctttgatgactttactaaggagcaaatcaccactgcagttcaaagcgcttatagtgaacaatgggatgatcgcagcattgttccaatcgaaaagcacgataaccatttttacatggagctttttcacggtcctacccttgccttcaaagatatagctttgcaaatgttgccacaattaatgaccagagctgttcaaattgaaaagattgataaagatattattattttaaccgctacttctggcgatactggtacggcatcaatgcgtggctttgctaatcaaaagggtaccgatgtcatagtcttttatcctgaaggtggcgttagtcctgttcaacttaagcaaatgctcagccaacgcggcaacaatttgcgtgcaattgcaatcaaaggtaactttgacgatgctcaaactgaagttaaaaaaatcttcaacaatgattctttcaaaaaccgacttaatgctaatggctatcaattttcttcagctaattcgatgaatattggtcgtctggttccgcaaatttcttactacctctacacctatggacaattagtacgcagacaagaaattaaactaggagacgaagttaactttgctgtgccaacaggtaactttggtgacatcctagctggatattatgctaagaaattaggtttgcctattaaaaagttgatttgtgcatctaatgaaaacaatgtattgactgatttctttaataatagtgtctacgataagcgacgtaagttccatttaaccaatgcaccagcaatggatatcctagtttccagcaatttggaacgacttttatttgacctttatggcgaaaataactatgaagtcgctagtttaatgaatcaattgactcaacgcggtcattatcaagttagcggtgaagttttcactaaattacaaaaaaattttgcagctggttttgcaacagaagaagaggttaaatcagaaatcaaacgggtctacaattatgaccgctatgtaattgatccacatactgctgttggctcttttgtagcaaatcaatatcaaaagaagaccggcgatcaaaccccaatggtcattgtttcaacagccagtccatataagttcccagaaacggtgtatgaagccatcactggtggtcctagtatgcaaactggcgtcggtgcaattaaagaattgcatgatgaattaggcggtcaattatcaatcggtgtgcgtgccctttttgatcgtgaacccaagaccgaaaaaattattgaaccaaatgatatggaaaaagaaatcagttcaattttagatttgaaataatagttaaggaaaaatagatatgaaagttgttaaatttggaggttcttccctagcctcaggtaatagcgtagataaggccctaagtattattaatgccgatcccgaaagacaagtcgttgtagtctcagcaccgggcaaaagaactgaggatgatattaaagtaaccgatctaatgatcacttacgcatatatgagcttgaggagtaataattatcaagacatcgctacccgtatttttaagcgttatgaattaattgcccaatattttgagctgcctgaagcagaattagaggatattaaccagcttctacttacattgccgaagctaagttaccctaataatgactaccgcatggcaacctttaaagcacacggagaacgtcttaatgcaattttgattgctaaaattttaaatcatcaaggaattaaagcacgatttttagagccaaaagatgtaggtttaattgtcactggcacttctaataatgctgaagtcaatcctgaaacttatgtgaacttaaaaagaattaaggctgcaaaagatgaaaagatcatttttcctggcttctatggcattacaccatcaggacatattgctactttctctcgcggtggttctgacattaccggtgctattctagctagggggttaaacgctgatctttatgaaaacttcaccgatgtcgatgctattttttcagccaatccccatatcgttgatcagcccaagccaattaaaagaatgacttatcaagaaatgcgggaactatcttatgcgggattttccgtctttcacgatgaagccttaattcctgctattcaaggcgaaattcctgtcaatgttaaaaatactaatgctccagaaaaacctgggacaatgatcgtaccagaggacggctttatacctaaacacacaatcacaggtattgccggaggcaaaaacttcgcggccctttatttaagaaaatatatgttaaataaaggtgctggtttcaccttgaagttaatggaaattttgcaaaaacatcatgtttcatatgaacatatgccatctggaattgatgatattaccattattttcaaaaaagatgtcttaactgatcaattaattgatgttatctgtaatgaaattcaaactagtctaaatcctgatcaaatgcagtggattgatgattatgcaatcacaatggtggtaggtgaagggatgaaggacaagctgactttatgtgctagcttgctttaccctcttggtaaaaagaacatctccattcaaatgattaaccagggtgcatcccaaatctcaattatgattggtaccagacggcaagatgaagaagtagttatcaaaaccatttatgataatttcattgctcaggataaaatttaacataagctataatataacaaataaaaaaatggtaaatctggttattagtaccttgatttaccatttttactttatgagattatctttttactaaaaagtaactactttatactccaaatatttttctccatcaaagttcattttcacaataaatggattctttggctggatcatagcaaaggcttcatatttaaagcttggatcatagtaattaattactgatccaattgctgtaccatgtccaccaataatcatagtttgatcttgatatttggacaaaactagcttcaaagcagcaacatttctcttctgcgtctcttttaaagactcgccatttcttagcttataatcaaaatcttcccactgtctttcacaatattcatgaaaattagaaatccactcatcaccaatttttctttctctaaagtcagaaatagatgataatgttagtttcttctcgtctataactggttgaattgtatcaattgcacgcttgaatggactagaaaaagcttggtcgatgtgtttatctctaaagtaatcagttactttttttctatcttgcaaccccttttctgtcaaaggacgtgttaaatcatcatgaactgataaatcaggttgagcatgtcttacaaaatatactgttgtcataattttctccaaagcgataacatattattatatttttacttccgttatttgaatcagattttacttaatctaattcataaattcaataataaattaacttttccttgctctaatccaatttttcacgatacactaaaagcaaatgtttgtatactcacgaaaggattttatatgggattagaaatactaaatcatactgatcaaaaactaatttccaatgccgatttttggcaattagttgattttcaaagagagtcaaataaattctctgagtttaaaggcgtttcctttgtttctaatattaaatttattgagcaaaatcttataccacgttttgaccagatcacactaattcttggactaaccgataatggatcaaattcaattggcaaaagaattgaccaaattttaaataaacgtcgtgatttgattgaatatagctacgaacaccaagatagtcccttcactaaacgtattttagatggtagtttacagctttttttcaccaaacagaatttgattcacactaagctttatttaatggaaaatcaaagcaagtactctgccttttcaggttcaatgaatcttaccgatacggctgttaataaaaatatggaacaattagtttgggattacggcaatacttctgatccattattcaattgctatcaacaaatgtttcaagataaccttaatcaggctacaacttatattaatgctaaaaaactatctggttatttagaagacaaaaataaagacgatcttcgcattcatgtaatgcaagattcttctcttgaaatcaaaaacagtcctaattcaactggtaaagacataattattctcccagctgaagagataaaaaagtatcgcgaccactacagcaaagatgatgaattaaagaaattatctgaaaatgaaaaactcgttgcttctcaaacagttactttatttggtgaaggtggcaataaaagacgtaagctagatacaatcgggcaagatttatatagcttgactcagcacattattcgtcaagacaaaaaggcaaaagcagatacatcacaaattgaaaaagaagaagatctcttccctgttcctgttcagttttacaataatggtcaattattccaagcctctaaaattggtgataacatcccttctgaagttattacttctgatttaactgaagggcaattaaaaaatgcgcttcaacttttctgtgatatcactcatgaatataatacttacaaagaagttggtgaaggctggcaagcttgtgactttatgctgtttctatatgaatcaccatggctttggaaaatccgcaatttatatgaattatctggaagcaatgtatctagagaagacgtgcctattgctacagcactaatcggacaaggtcgaactggtaagtccaccctagggaaaagactagccgctaaattaattggtgctcataatttcttagatagtggaatgatggatccaaagaattatgcccttggcaagagtaatatcaatatgacaattaccaacacgctaagtgactatgtatatacaaatggtcctgtaagtccattaatgattgatgatgtcagtcccgagcttacaacccgtacttactttgaaagattcatcaaggaagttactaacaatcgtaatttaactcatccctcaccagcattcattttcacgatgaatagacaagaaagctctattaaatcacaattttctctaaagcctgaaattatgcgtcgtttatggtatttaagctttgaatctactttttcaggtgaaagtgatcaacgtaatgctgcattaactagcttatttagtcgtgcaaatgatgatctttttaaatattgtcaagttgaattagcaaaattctttactaacgttagtgttgaagatgcgcagaagattgaaagagacttcttatatccaatcaagcatgttttaaaaactgcacttgataaatttgatatgtataaccaagtcagcaaatattttgaagaaaattacgattactccctatttgttggtcgaaatgattggggaatgttaatcaatcaagcaaaaatcggaagcgatatcttatttattaaacaagatgaccggctaaaagcccaaatcaataaagaacttttcaataaaatctccgatcaaacggcgaaaaacagcggttctactatgcttgatcgctactttaaatatttgcctagaaaatatcacattgcatcgcaacaaactagcaccggttttattattgatgttgaaaactttgataaatggcttgatgatgatacgttaatgaataagtatcaaaacagtagttcatttagagataagcaacaaagagataaccaagcacaattgactcaaacagttgatatgctagctaaggcaatgttagaagatcgtgaacagcgacgaaaagaagaggctaaaaagaaacgaagctggcttggtaattttttccacagaaattagtttataaaagatttcatattcaaaataagacttttaacctcttaacagttaaaagtcttatttactatagggataataatgtttggactttgattgatattcttttacagaaattatcttattttgatcattaaattctataattgatacaccatcgaattcactaatttttccttgataattacatttaaaatgccattcggcaatgctcgtatcaccattaattatgagtctttctattggccaagcaattacttttccttgtttattccaattttcaaaccaagatattatctcctttttatttctgtaaactggaccatagcattcactataaatagcattttcgtcaaatgtattttggactacttcaagattaggacttagccatgctcgaaaataatttctaattatttgctctttatccatttatagcgatgtccagcctttcttgtgaaaatggttaaacaagtttttattttctcttaaaagttgcaaaatattttgtttatcatctactacaatattcttatcttgtaacaaacccataatcgaatttagttgctgatagtcgacatttccaagtgtcaaagtcatatttgttcccttacctaaatccaaaatcaaatttaaataatcaggattaaagtcaataggactaagacgtacatttttacgatagacaacggcagctttctttacatcagataaattaataacttgcttactctttttatgtaaccctagcagttgcatcaattttatcacatcgttaatatcataatttataattgtaatattttcgctactaatctgccaatacggattaaaacaagtaggtaaagttacaaatacacctaaaattagtacaataaggaatagccaccaagcttgataaccaaatcctgtcaaaaatagtgaaagtaaaactaccacaatcataccgattaaaacatggctcaatttaacaggagttccaacaataatttttttcatcacgttcaccttcttactttacttcctatataatattataaagcgctttcaaaaataaactatagaggttaaaaatatgaaaataggtattattcaagctacatcgcaaaaaagtaaaaatttcatattagagaagtatatcaaagaatctgtaggatccaatgatcaagtattcaattttggtatttatcaagatagttcggctagtctatcttacgtgcaagtttccctagctgtcgcattattaattaatagcaaggcgactgacttcattgtgacaggatgtacttctggacaaggaatgatgcttgcatgaaatacttttcctaatattcaatgtggttatatccccactccacaagatgcttttctttttggtcatatcaataacggcaatgttgtctcctttccactaggacttaattggggttggagtggtgaaatcaattttgagcagactataaaaaatctttttgaacagccttggggacaaggttatcctccttcacaagcaaaaagaaagataagaaatgctcaagaagttaaaaatctcaacgtaattagtaagaaatcaatgattgacattatacctaaaattgatcctgatcttattttccctgtgctcaattatgaaccgatttataacttcataattaaaaacggaaccgatcaaaaattaatttcaattctgaaacttgaaagctaagattaacgctccttccccgcgcctcttggctttttcttatcaaaaataaaaacgcaggctctctctgcgttatactttaagtgtcgacctaaaaagtaaaggagatcctgcgcaatgaacagtatagaacaaatcgacacagaaaatgatactaaatccttaatttcttcatttattaatctaattggtctagctaagttaactaaacaagtcaattttaagcgtaaatccaccgtttcattaaccatgattatctcttggctgatgtcagtacattttgctcggctttctttattcagagctaaggatgacaaacgtttttccgttagaactgctcgcaatgtacttaacgatggaagaatcaactggcaaaaactattatgcttgattgcagcccggctcattggctgcttaaaactatttatcgataaaagacgccgacttgcttttatcgttgacgatacgctgatggctcggtctttttctaaaaagaccgaattgctagctaaagtctatgaccatgacaagcatgagtattggaacggatatcgtggtttaactttaggctggagcgatggcaataccttcttgccggttaactttgccttgatgtcaaccaaaaccaagaaaaatatgattggagctgctcccattactgctgatgaacgttcaatttctggtaaaaggagaaatcaagctcagagaaagatgaatgatgtaactgtagagttgattagacaagccttacgattaggagtagaagctaaatacgtcttattcgattcttggttttcttctccaagaatgttttggattttaaagaagatcggtttagatggacttggcatgatcaagaagagttcaaagatttattacatttatcgccatcgccgctatagcgttaaagacttgtatgatcgtttggctgcttcaaacatccgtaaaaagaaacattatctttattcaagcatagttgaggctcaatatcatggacatagctttttattaaagctcgtctttgtctccaaccgtggaaacaagaacaagtatttggttttagctactactcagacaaagcttagccctgaagaaatcatccaactttatggtcgtagatggcaaattgaaacatattttaagacgtctaagcaatatcttgctttagataaatctcaagttcaaagctatgatggccaatgtggctatatcgcagttacagcaataacttatgatctattgacctggcaggaaagacaaaatacagatgataagacaatcggagatttattctatctaatgaacgaatccttacctgatattagattcgtagatgcattggtctacttaatttcagaattaaaagagcttaaacagaatagttttgaaaagatagatgaagtaatcaatgactttattaaccaactgccacgattcatacaaattgcactgaaacagatcatataaaaactaattacgtctaagaaagctcaatagtgacaggacttgagcttgattttggtgctttcaattttcagtttcaattatcaaaaggataaaaaatgactacaaaaattgaaaaaatatctcctaaaatctacaaagtaactgataacgataagcatctaggcactatttctacttatcacaatctttttcataacaaatatatttatctaaaattcaatctaagtgattactctgtaaatattccattttcaaaaatagttcaagcagagcaccaagcattgcaagtcatgattgattcaaatgaaaatccaatcgtagattttttattaagaaatggttttatctgcaaacgacactgttatacgcttaccgttaacaaaaaagatttaaaaattgagatcaataacaaattatctcttcattttttcaatacagaaagtccgattacgaaactgtcaaatcttttgtgtaaatagttctttctcgtaaattgattttttaattatttatttaatcaaagtaggattctaaggtgtcctgaacctgaccaaagcctttatgaattcgattgaaataacggtcattgtagctcattgcctgaatgccaataaaagcatcaagcgactgttcagttggaaactctgccttaggcttagctttgcgcttgatcacattgttaaatgattcaatcatgttagtcgaataaattgaagctctgatctgcttgggatagttataaaagaccagcagatctggttctatgtctttcaagcttctgataacatggctgtaaaccttgccccatttggtatagaagtcatgcaggacagctgtggcttcttctttgtttgtctgttgatgcacctgtttgaattcgttcatgatcttttcacgatcgtcgacgcgtactttagcgcagatattgcgcatgacatgaaccaaacagcgttgaaaatgagctttaggataagtcctggccaaggctgttttcatgccaacaacaccatcagaaagaaaaagctcaacttgctttaagcctcgggatttcatgttttgaagcatatctgtccagacttcaatgttctcgctaggtgcaatgcagtagtcaatgacctccttgtgcccattaggcttgatgccaatggcaatatagactgcttcacgctcaaatgtttctcggcgcaaaggaaggtatgtcgcatccaaatagacgcagaaaaacttgtcgcttagcttgcgtttgtggtaagcctcaacatttggaatcatctgcttggaaatatttgatacctgagctggactgtaatggctgccatacatcttttcaattagatcggctatttccctggtggtcacgcccttggagtaaagcttgataatcatgctttccaagatatccgagtgctgcttgtagtcaggcagcgtgtgctgatgaaattgaccgttgcgatcccggggcacttgcacttcaattgggccaaattgcgtatcaactttgcggaaataagcaccatttctagagttgccagtattccagccatttctggcatagggatcatagcccagaaaggcagtcaattcagcttctaacaagttattaacagcctgttgtagctctttgcgcaataaatcatttattttgtctggattgaatagagcttgagcaaaatctttggtaaaatcattcatgaaggagttcttctttctgtatgtgtttttttgttcaaaccaatcatacgagaaaggaactcctttttctaatgtttaaagaaataaatttaaggaatcattcatccttacacaaactattttacagtctatgcatctgtgcaacagtatgctttttcccgtcataataatatcgcttaacaattttatctctaacttgatcatttaagtcttgtacctgagcctgctgctgataatcaactaaagcactcacaccatagtcaactaacataatcagaaaagcaagaacattgattaaaataaacttagtccaattacgacttaaaaggatattcgtctcttcttgtacaacgtaagtattggtaattgataaagcaggaataataatccaaccaattgcagttaaccagaaacgaactggattggttttaataaaagctttcaaattcatcttactttatcccctttcttactttttaatttaatttcttgatcaaattttgcttttaattctggcgtaaagttgtgagcaatcatcaaaatagtttgatctgttttgagcaattcatcaatgattttttcggtagctttttgatcgatcgcactagttacttcatccattaaaacaaacgattgctcgtgtatttccgttcgcgctaaaacaactttttgccgttgtccaccagacaaattttcactttttagatcaattgttgtattaacaccatctggcattttggctaagtcggattggagttgaactgcttgaacaacatcttgaagcttatcctgcaaattttcgttaaacattgtaatgttctctttgatcgttgcgggaaaaactactggattttgcggcatattgccaattctagcttttccttcaggaatgatagtttcattttcatctagataggtcaccgtaccagattcaggttttagcttacctaacaaaacattaaacaaggttgattttcctgttcctgaatcgccagtaagcaaaactttctgccctttttttattgtaaaatcaggataaaaaattgtttccccctgatcgtattttacagacaagcctgaaactttaagaccgtaggctgatactttatctttattttcatcaggaacttgctttcttaaatcggtaatctgttcgcgtaaagccttagttgacttaacttgcgttaacgactgagtaatattccaaattgctgaaaaaatcgtaaatgcaaaaccactagcaactgcaaaatcaccgaatgaaatcatattaagcaaaaacatgattccagcaataaagctcataccaatttgtgcaattgaattgctaaaagcattaatcaaataacttacacttcttaattttgcactacccttacttgcgtccacataatcactacttgatcgatgaatttgcttaaccaaacgactgtatgcactataacgacgtagttcctgcaatccaccaagccaatgagcaattgtatttaacagcttttcattctttttatttactttatctgtggcagctgatgttttcttctccataattttaggagcaaaaagtgtaatcacagctaaaatggcagtaaccaaaattagaatccagttcatgcttgctagtaaaacaatagcaatcacaatctctaaaaccccacttaagatagtaatccaaggtgtagcataatcatctgataagatttttaaattggctgttaatcggttctgcatactagagactttttcatcacttttttcataatagtaatgatgcatgatttcttgccgaattttatgcagatagttttgcgtctgcctagtgaaaacaacggtagtaattggtaaaagcaacgaagtgaataatgctaaaacaaactgcattatttgccaataaacatatgtattaaaattaccagcagtaattgaattcagagcatatttaaataaatattcactaaaactcccaaataatgcgtataaaacatacaataagataataatgcaggctcgaaacgagactgtaaaatagtttgtgtaaggatgaatgattccttaaatttatttctttaaacattagaaaaaggagttcctttctcgtatgattggtttgaacaaaaaaacacatacagaaagaagaactccttcatgaatgattttaccaaagattttgctcaagctctattcaatccagacaaaataaatgatttattgcgcaaagagctacaacaggctgttaataacttgttagaagctgaattgactgcctttctgggctatgatccctatgccagaaatggctggaatactggcaactctagaaatggtgcttatttccgcaaagttgatacgcaatttggcccaattgaagtgcaagtgcctcgggatcgcaacggtcaatttcatcagcacacgctgcctggctacaagcagcactcggatatcttggaaagcatgattatcaagctttactccaagggcgtgaccaccagggaaatagccgatctaattgaaaagatgtatggcagccattacattacagtccagctcaggtatcaaatatttccaagcagatgattccaaaggttgaggcttaccacaaacgcaagctaagcgacaagtttttctgcgtctatttggatgcgacataccttcctttgcgccgagaaacatttgagcgtgaagcagtctatattgccattggcatcaagcctaatgggcacaaggaggtcattgactactgcattgcacctagcgagaacattgaagtctggacagatatgcttcaaaacatgaaatcccgaggcttaaagcaagttgagctttttctttctgatggtgttgttggcatgaaaacagccttggccaggacttatcctaaagctcattttcaacgctgtttggttcatgtcatgcgcaatatctgcgctaaagtacgcgtcgacgatcgtgaaaagatcatgaatgaattcaagcaaatccatcaacagccaaataaagaagctgcgatcaaagtcttgcacgccttctatgacaagtggaacagagcgtacaaccatgtcatcagagatctcaaagagattgagcctgatctgctggtcttttacagctatcctaagcagatcagggcttcaatttactccaccaatatgatcgaatcctttaacaacgttatcaagcgtaaagctaaacctaaagcagagtttccaaatgaacagtcgcttgatacttttattggcattcaagcaatgagctacaacgaacgctatttcaatcgaatccacaaaggcttcggtcaggttcaggataccttagaatcctactttgattaaataaaagattaaaaaatcaatctacgagaaaaatctatttacacaaaagatttgacagtttcctcgaaacacattgcttttaaatagctcttttaaactcatacttctcctccattaatcattaataaaaatatttatcatcctttaatcttactacacaaaaataattttttacacatatttttttaatttttaagctaaatcatatttcataaacataaaataagactagtaatcaattcaaattgactactagtctctttgtttaccaaaaactacatttttcgcaaaacgtcgatcaatacacgacgtaagtcttcgttcttcttacccatttcttcgatcaatctagctttatcatctaaagcctgattatatttatcttgcaaagcattatatctttgctccagttgattgtaatttctgattactgtattgtagcgttcacgcaaaccgctagcttcatcaaattcataattattccgattatcataattatttcgattattatagcggcggttagactgattattacgtgagcggttattattttctcttctgatctcaaaaggatgcttattttgtcgcttacgttgattttgcgtttgattattattatttcgattattgctattcttctgattattcttacgctcaaagtccttagattgaccttcacgactttcattctgatccttagaatgttgctcaggcttttctttagtttctgtttccttattttcagccgctttttcagcattcttgcgatacttttgatcaatcttgatattttgataaaaaggactaagttcagctataactttttcaccatcttcaaccgaaaaacttccccgcttgttaactggcttaataaagttggtcttcacaattgaagcaatcttatcctctaatttcttttgaatagatttatcaatcttatcattctttataactttagctaaaatcttacgcttagtaattgtcttaacccgcttagatttagaagctggcctcttatcagtagcatcctctttagctggggcttccttagcacgacgttcaattgcatctgcgtaatcttgtacattaccaataattaatttagcaacagccggcttaaaatattttcttcttcgcacagtaatacttggttgtttacgtgtacgcacaaagttataaattttaatctttagtttttgttgtaattctttacttgcattaggcaacaattgatcaatcatttgattcattgttaccatttcatttaaatcaatattttgttgttctaataatgtttgctctactattcctggcatttccaatcctatattcttttaattttttcacaacaaaaagggccattacggcctattttgcaataatacatcaattttctcattaataaacttaatgcactttccattttacaacattaacgctatttacgaaaagggctacaagcatattctctattttttaaccaaaacaagcagcatcccatcgatactgctttattttatgcgcagttgcactagactttgactctatttctattttacgtgctaaccagccttttttctagttttattttcttaactaatccattaggttttacatataaattcttaatattatttcgctattataagatcaattaagatgaaaggaatgagaaccttgattaaactactcttaattggttgatcatttttaacgcttggtttaatggccatcagctcagtattaattaataaaccagcagtagcaaaggtaaaacatcgccactaaaaaccagaataatatatgttaataaatcttttcccctctaactagaaagaccaggttatgtactccacatagcctggtcttcttttcgtcttattctttatggttggtagaaaattgcaccttggtcaacaattacatctggttgcaacttacgtaaactcttactttcaacacaatattttgtattattcaaatactctttgaagttcttagtttccaagtgctgcttgtaagcttcattattacgataaacttcaatagctaaccattcatttggttgatcggcaacagttcctgcaatcattgccaaaatatctttttcttcttcgactgccgttttcatttctttcattacagcatgagcaaactcatcgcccttacctaaagaaacaccaatttcagtcagataaataacataatcatttgatccggtaactgctagtttttctgcctttgtagaaataaattccggaaacaattctacctttactcgactagttaaaatatctttagcaacgtcagtaaaatccttaaattgctttgaattagcatgagtatcataacttgcttcgtcttgatagcattctactacaaaattagtagtttcttcgtcatgacttgtctgcataaacaatgtgcctggttcgttttcttgagaagtaagcatattatgttgccctgccttaacgaactttgcatgatcctctttattagtttctagtttatataaacgcaaaattggtgtttgttttaatttcataacttctcctccaagaattaattttgtcattattatactaaattttatcgcgtctattagtaaaaaacatcccttagttaagggatgtcacaaaactataacgtgtaattaactttcttaaacttgtagtccttcatttttttagctaatttcttgcttctgaagtagttaccaccatcatatctactagaataaaccagcacgttatgctttttaccattaatggtttgtggtaccactcgataaagactccaattttcaaaagtaatccacggatcaatctcatagaatgtatcattcttcattttggtagttttaccagacatccagttttgcgttaccttatcaaagttcttctggttagcaattctaccattgaagtaatcactaattgtcgaagcctcctgggtaaatattggtttgccattaacagtatgttcagtaaaggtgatctttgtgccattatgtgcattacgatcataagagtaccaagtaccctgcatcttttttggaatagtaacctgtacaccattaccataagttgaagcatcaacagtctcaacttgactagccaaaccagttaatcctaaaacaagtaccattgatgttaaaggtaacaaagttctttttagcataaaaatcatctccagaatgtaaaatatatgagtccgctttcataatatattttacagtatcttatagtacttagacaagatatttttaactttacagattaatattcttgctgcaatagctttataaactcactacttaacgctgaatttgacttataaaaagccattatcttttgctttattaactgaccatgatcaagcaagaaaagtggctgcaaatctgtagtattaattaacctagccgtattctcatttaaaataaaatagccagacctagaggcgaccaacagtgctgcttcttcgaccgagttagaagcgatgaattgactgccaatttgatacaaatctttaaataaatgtagctcactaacctcttcttcaggtttagccacaataaaacaagtcatatcattgagctcgtctttttcaatcatttgaatgccattaggatacattcccttgggcaaaattgccattacaccagcttgagtcaattctgtttcatcaaagttaagattctcgtcacgcaaatcattgattgctatgtctgcttcatcttcattcagttttgcaaaagcaccatcatgactagtcgcaagtagttttacatctacattaggatgttttaacacaaaatgctgcactgcctgatctaattccttacgacctaattggtcaaaatatgcaatctttaattccgtcattttatttttcatccagcggtgcgtgtccttcttctgctactcttcttttatccttagtatcttcatgcttattaagtgccatcaaggcaaaaaagatcaaattcaaaccactaactacaatgccaaataattttattaaattgagtttcttttctttactcattttttaacctcacaactaaaaataatcataaaatgatacatcgcctttaacgaaatctaattttttgatgcggtaatctgtaattaatcctagtttaacagcagcattcatggttagtctacctaatagcacctgggtccacgcggtaattgatcccgaaaaatcaaccaatgcatcttccttacgttctaccgctaccttacgtccatgattacttaattgccaaactccaatattccaaggacactgttcatcgctattgacttccagattaaaatcaccttcttgcattggccgcatacaagccaaaactttttcaaaatcaataattcgactcatcatataaggacgcaaatcaacttggagttcgttttgttcaggaaaaagttcagctcgtaacgatttctctggtacgctcattttaaattgcttaacactgcccgcgtgcgaacccataaaaccaaacatactcaataatccctgcggcgtaattgcgtacatttcatcagctaaaaaagtattgtctctaatgcgataaatcaagtaactaattggccgctcatccgcgtcaaaataaacggctacattgcggtgatgataataagaatcaagtctattccaccaccatgcctcacgtacaaccgtgttacgttcatcatcagtatgcagttgacgttcataaagttgaatcacaccattttgaacagctaaattgtcccacttgccacgcactatatgaccagaacgtggtaatttaaaactacgcaatgcgcttccatcaaagcgatattctttttgataaatactattgctaaacccgtactggcgataaaagctctccgaaaatggtgccaggttagcaaacggaatatcttgcctatgtaagtcatgcaaaatttctttcattaattgggaaatatgaccttggccacgatactcaggatatgaagctacataacctattccagccatcggtaaatgatgcccaaaaacatcacttttaaatcgattaaccataatatagctagctaatttttccttatcaaaatagccataacctgtactatgatcataacgactcataaaattttcgtctttagtcaaatcattatttttcaaaaatgcatattgaattaatgccgtaatttgctttaaattattcttatttttctttaattccatgcttattcctatacgtacatctataaatttattcattactattttagttcattttttaaatttttaactagatttttcataaaaataaaccggaatcataaaatcccggtttattttacgcaacgtattcttgataaagctgagagataaatgcctgcatctgttccactgaatgtctccggctgcgagcacattctttagcagggcgatcacataaaaagcacttacgtggctgcctgcccaaatctctgcgtgaaattgcagcttgtttattttttaccaacacgtctgcatcaaagagacgtcccaatgatatctgattctcaaaatcaattgttgagcgctttactttttcaattgacaaagataatacataaaagttttcacagccactatcatcattaagctgtgtcaccaatttaaaatgataacctaggttagtccaagcattttccagctcattgatacccaacataaacattttagttaaatagcgattattcttgattggtcctgggatattcatattaatgtcgactagagtttgattaggatacttattaaaaatcttatgttgtacagctactcgcctatctttagctgctaaaacttgggcaatatcctgcttttttccttcattaaaaatattcatttttatcacccagttaattataaatgattgtgccgactccgtctgctagtttgttggcattgctcaaagaggtgataattgctaaattacctgttttttctacaaattcaattgcagcttctatcttaggcttcatactcccagctgcgaaataacctgctgctagatattgtttgagctgttcaacttttattttaccaattgcttgttgattttctttgccataattcaaaaatgcatgatccaccgttgttagaattactaattcatcagcgttgatatcttctgccattttagcagcggaaaaatctttatgaattacgccggcaacacctctgagatgcccatctttcacaataacaaggatgccaccaccgccacaggcaatcggaataaataaatttcctaaagtagccgccatcactgctttaattgaatgcaatcgattttcagcttctgtaaattgccaagcatactttgaattaaagacctcatcagttacttccatctcatttaagccatatttttcatagatttcttctcccacctgagttgttcgatcatgaaaagctgtcaaacaatgcataaagatcaattggtcatctggtgtaccagtcatttgcatcattttcattgtgaccgtatatggctttaataatttaattcgttcagaccaatcattttcacccatcgaaacccaaacatcggtataaacaacattggctcctttaacgccttgagcaatatcatctgtgatcaaattttttgaacctgaatcttgggcaaaattttgagcaattttttgtacatcaggatgtgtaaacaaaggcttgggtgtaacaatatgtacattaacacctaacattgagccacaaactaaaagactgtcggcaacattatcgcggccatcacccacttccaaacaggaacgccagaatatttagccagctcttctacatcttcttgagcaaaaccgcgatattcaattccatcatacattgagcctaggactttagccgtatccttgacgctttcttttttacctaagtggatctcgcttgcgcctagatattctggatgagcacctaaatcattacaagctactacaaaagcagatcgcgtcctagttgaggctttttcaaaaagtagtgcaatatttttacctttcagatattcatgtgggatatgctcttttttaagttcttttaaatgtaatgcaaaatcaattaaatatgaaatttcagctggagtatagtctttacaatcgagaaaacttctaccttgaaaaacattttgtaaatatttcattttttgcctcttataaatcttcacgaatcaacggacacgacatacatctaggaccgccacgaccacgtgagagttcactagaccgaatctcatgaacgatgatgccatgttttcttagcaaatcattggatacataattacgatcataagtaacgacttcacctggtgcaattgccaaggtatttgagccgtcattccattgttcacgtggtgcggcaattggatcaccaccaccagttggaattaaatccaattcgcttaaatgtaagttttctttcaaaacctgcaccaaatcattcttttctgtgatttttacaccgttgtgatcatcgggctgtagaacataaatatcaattttgccggctttatctaaaataaagggatgaaccgtaaattgattataattaatcattgtaaaaactgtatcaaggtgcatcatagcatgattgtgcggaatcttaatcgctaaaatcgtatcataacttgaatgatcaaataaattatgagctaagtcagtaattgcagttgcagaagtgcgttgtgaaatacctacagctaacacatggttatttagaactagttcatccccgccctcaaggcgaccatgatgataacggtcacgccaaactggaatagttgcgttcttgaaatcaggatgatttttcaaaattgtttccataaataatgattcacgtcgtctagctctgaaagtcatccggttaatggtcatccctgaaccaattgcagcctgttgatctcgagtaaaatatacatttggcattggatcaagataaaaagggtaatctgggtcctcagccaaatctgctaaagatggggtagaattatgaatcgcactttttctaattccagcaatcaccgtttttaccatttccttagttagcaattcttggagatagttcagcaataattgatgcaaaggatcctgttttttaatacttgattcatccagtaactgatctaagaatgcccgacgaactttctcatctgttaaagattctgctaataaatcctcaagatataatactttgatcccctgctgcctcaatacatgcgcaaaagcatcatgttcttcttgggcaatcttcagataaggaatatcgtcaatcaacattcgatgcaaaatatctggggctagattttctagttcttttcccggtcgatgtaacatcaccgtttttaacttaccaatttctgaataaacatgaatcggactcgacattcaaccaccttctattaattattgtacccgtttacatttattatggatcaattaggtaaaagttacagtattatcatattgcagcaatgatttttttcattaaaggtgtaacttgatgatctttacgccaaaccagctgcaaatgtgttatccaattagcatgtttaattgcgatcatattttcttgggcataagttgtcgcaattgattctggtactagcgctactcccatttttctcttggcccaagtaattgctgtccgtgaatcatcacacttaaccgcataaaatggtttaagcccatgatgtgcaaaagtttgattaaaaatatcctcaaagcgacgataaataatcaatggctgatctgctagatctttaatgcgtaattcttttttttgctgaaaatctgggtctacactaatagccatcattttttcagttgttaaagtcttagtatttaaacctgtctggttgtaaggcgttcgtacaatgcctagatcgattgtctttttttctaatttatccaggatgccataagtattatcttcataaatatcaaaagaaatttccggataatattttcgtaattcattaaaagaattcattggtatcaagcccgttgaggaagatgccattccaattgcaatcgttcccaattcaccggaaatagtcttatgtacttggttttcagcattttgagctagagaaataatttcattggcatagctttgaaaaatttgtcccacatcagttagctcaataccatgtgccgttcttttaaataattgcgcgcccaactctttctctaattgttttaattgatagcttaatggtggctgtgcaatatacaagcgcttagcagctgctgtaatctgcttttcttctgctacaactagaaaataacgtaactgttttagattcatattatttatcctttttttatttcaattgatagtgatattaaaatatttaatatcttatattgtattttagtattttattcatagcaatatctgtgctaccttattaaggtagatttggagggaaaataatgtctgataaatttcacggcttaactcaagccgaagcagacaagcgcttaaaagaagatggcttaaatgaagtaccagagcctgaatacaatttctttaaagagttcttgtctaagttatggaacctatccgcttggattctagaagctgctttaattctagaatgtatcttgggcaaatgggtccaatcattattcgtgttgttgatgcttttatttgctgcatttaacggtgcatctaagaaaaagcaatcaagacgagttttaaataatatttcacacaagttgactcctactgtatcagttgaacgcgatggcaagtggatcaaacttgattctaaacaactagttaaaggcgatttaatctcacttaaacgcggggacgtactcgcagcagatgttaaaattgttgacggtaacttagcttgtgatgaaagctcaattacaggtgaatctaaaccagttaagaaagcaattgatgacaccgcctttgccggtactacagttgttgaaggtgatggcctagctgttgttactgctacaggtaaagattctagaagcggtaagacgattaatttgatcaacaattccgctgctcctggtcacttacaacaacttttgactaagattatctactacctttgcttactagatggtgttttaaccttagttattattatcgcctccttcttcaaaggcggtaatttcaatacctttattaatatgttgccattcctggcaatgatgtttattgcttcaattcctgtagcaatgccatcaacttttgctttatccaactcatttgaagcaacccgcttaagtaaagaaggagtcctgacttctgacctaactggaattcaggacgcagctaacttgaacttgcttttacttgataagactggaacaattacggaaaacaaaactgccgtagccgcttggactgatctaagtgacttgcctgacaaagacgtgcttgctttagctggagccgcaactgataaacgtaatgctggtattatcgatacagcaatcgatgaatacttagtagaaaataacattccagtcatgaatgctgaaaactttactccatttacttctgacactggttattctatggctgatgttgctggacataatgtaaagcttggttcatttaagcaattatctttgatcgataaacatgccgatgaagaaatttctggaattaatttcaaggcaggacgctcagtggcagtcttgattgacgataagttagctggtgtcttcatcttacaagataaagttagaacagactctaaagcagctttggctgaactcaagaaacgtggcgttcgcccaattatgttaactggtgacaatcaaaagaccgctgctgcagtggcagaacaagttgatttaactggtaaagtaatttcgattcacgatttcaatgaaaatactgatattaatgatttggccggtattgctgatgttttaccagaagataaactcaagatggtaaagcttttccaagaaaaaggctatatcgtagggatgacaggtgacggagttaacgacgcgcctgcattaaaacaagctgaagtaggaatcgcagtttcaaatgctgctgacgtagctaagcgttcgggtaaaatggtattactagacgatggtctaggctcaattgttaaaattttagacgctggacatcgcgtataccaaagaatgactacttggtcactaaccaagcttgctagaactgctgaattaacgatgctgttaacttttggctatcttttctttgactacatcccaatggccttgaatgcaatggttatctataccattatgaacaatatggttacgatgatgattggaactgacaggactcacattacttataagccagaaaactggaatatggctaagcttgctaagatcgccttttcactagctgctggttggactttaattggtattgggtttgtttggttcttaaacacacacggttggagtcacggtgctgtttctactatggtttacgtatacctagttcttagcgcaatgttgattgttttgattactagaactcgtaagtacttttggcaagattacccatccaagttggttggtagtgttcaaattgcagatgttctattgacctttatcttagctctttgtggttgggcaatggtccagatttccattcaaaacttagcaattactgtaattgtagcgattattgctgccataataatcgacttaatttaccaacctgtgatgaaaaacaggtagattattaccataaattttataaattaaaagacttctaggaactttgaactcttagaagtcttttaatttatctttttgattcacgatatcctgctgcacgtgctgctgctttactcttgaagaaaactgcattttcacgattcattcgataattatgaccgcgcattacgtgaaagatttttgatcgtttattatcaacaattctgtaattactggtataaatcttagttttatcacgatattgatgctttctccttctgtgatgaatagctgcattaacaactgatgtcgacccctgcaaatttgcaggcagaacactgatttctcccactaacatcagaaatgcaacaatagtcacaacccaattcttgcatcttttcataaaaacactcccttaatatgtcactatatttatatagtatacgtttatatatgaagtgttcctacgtttattagaaactagtttgaaactgtcaaatcttttgtgtaaatagttctttctcgtaaattgattttttaattatttatttaatcaaagtaggattctaaggtgtcctgaacctgaccaaagcctttatgaattcgattgaaataacggtcattgtagctcattgcctgaatgccaataaaagcatcaagcgactgttcagttggaaactctgccttaggcttagctttgcgcttgatcacattgttaaatgattcaatcatgttagtcgaataaattgaagctctgatctgcttgggatagttataaaagaccagcagatctggttctatgtctttcaagcttctgataacatggctgtaaaccttgccccatttggtatagaagtcatgcaggacagctgtggcttcttctttgtttgtctgttgatgcacctgtttgaattcgttcatgatcttttcacgatcgtcgacgcgtactttagcgcagatattgcgcatgacatgaaccaaacagcgttgaaaatgagctttaggataagtcctggccaaggctgttttcatgccaacaacaccatcagaaagaaaaagctcaacttgctttaagcctcgggatttcatgttttgaagcatctctgtccagacttcaatgttctcgctaggcgcaatgcagtagtcaatgacctccttgtgcccattaggcttgatgccaatggcaatatagactgcttcacgctcaaatgtttctcggcgcaaaggaaggtatgtcgcatccaaatagacgcagaaaaacttgtcgcttagcttgcgtttgtggtaagcctcaacctttggaatcatctgcttggaaatatttgatacctgagctggactgtaatggctgccatacatcttttcaattagatcggctatttccctggtggtcacgcccttggagtaaagcttgataatcatgctttccaagatatccgagtgctgcttgtagccaggcagcgtgtgctgatgaaattgaccgttgcgatcccggggcacttgcacttcaattgggccaaattgcgtatcaactttgcggaaataagcaccatttctagagttgccagtattccagccatttctggcatagggatcatagcccagaaaggcagtcaattcagcttctaacaagttattaacagcctgttgtagctctttgcgcaataaatcatttattttgtctggattgaatagagcttgagcaaaatctttggtaaaatcattcatgaaggagttcttctttctgtatgtgtttttttgttcaaaccaatcatacgagaaaggaactcctttttctaatgtttaaagaaataaatttaaggaatcattcatccttacacaaactattttacagtctcactagtttaattacttatcttcatttgcaccaaaaatatccaaaaattgtaaaaacaagttaacaaaatcaagatataattgcaaagcacctaaaactgcaagcccattagttgaaagatcatcaccatattgtaaataaatatctttcattctttgtgcatcccacgcagttaaaatagtaaatataatcacagcaataatcgaaaaaacgtagtcaatgattggattatgtaaaaacaaattagctaacatggctacaatcaacccaattaacgcagcagaagcataagaccctattcgactcaaatcttttttggtaattgttcctaaaatcgccattgttacaaagacggttgccgaagctacaaatgctgaagcaatattttgtccactatatgcacctgcaataaaagcaaaggtaacgccgtaaacaattggtgttgtgcaataaaggcagagataggtcccgcaaaaaccgtcattgtcaaataagcactaattgctgaaacgaaaaccgctaaggccatataaccatatattttgctaaaaaacatttaatcctgaatcattagcatattgctgttgaccagattcttgatcaaaattatccatcttaatttctccttcttaacacataccctgtactttaaatataacacctgtttaattaaaaacgtagcgagacaccctaccaaaatataaactatctcggtcactttggactagacctacaataaaaaatatcatataattggtatagacaattatcaaaaatgaggtactattatgacaatgagatctttaggtctgtcaatttatccaggccacagcaaatttgaaggcaacgctcactatctggacttagctcacaaatatggcttttctcgtatcttcatgagtatgcttgaagtacaaggcagccctgaagaaaccaaagctaagtataaaaaaatcattgaatatggcaataaattgggatttcaaacttttttagatgttaatcctgcaatcttcaaacaactaagtgtcagctatgatgacctgaaattttttgctgatattggtgcagcaggcatccgtcttgacacaacatttgatggtgcaattgaagcaatgctttcttacaacccatatggtctaatcattgaactcaacatgagtaataatgttgactatcttaacaatattatttcttaccaagctaatacaccgtttatttatggctgtcacaatttttatcctcaacgcggtactggcttaccttacgacttctttatcgcttgttctgaacgcttcaaaaagtttggcattcattcagccgcttttgtctcaagtcaagtaggtcaaatgggaccttggaacgtggaagatggtttaccaacgcttgagcaagaccgtaatttaccaattgatgtgcaagcaatgcatctctgggcttctgggttgattgatgatgtaatcatcggtaatgcttatgccagtgaagccgagttaaaagccttatctaaagttaatcgctatcaattgatgttgcacgtaaactacgttactgatgttaataagattgagaaaactatcgtagaagcgcctcaacatttccgtcgtggtgatatcactaaggatgtaattcgttcaaccatgccccgtgtaacttatgcagatattcctaatccagtacacgacaacaatgtagaattccaacgcggagatattatcattggtaacgacaactttggtcattacaaaaatgaactacaaattgtccttgaacctcataaggagtcaaggatgaacaaagtcggttctattagatcagacgaattattcctgctcgactttattaaaccatggtcaaaatttaaattaatcggtaacaaataataaacattctaagctaaatagtgaattagttatccgacgggataattgattcactatttttattcttttgtagaattaaagtagtggtaaaacgatatgccctgaggtctttagacacttgatgtcgcataataaactggcagttttacttaagttttcaatagtctcttcgaagaatgtggacactagatgtcgattttagaaaattagatctgatttcttaagtaaatacgttttactactaagttttggaggtttttattatgcaagttacttttggaattgatgtaagcaagtctacttctactgtttgtgaactaattggtgaaagcaaaaatgaactaaccattactaataatcgtcctggttttattcaattgcttcatgaattaaccgctttttctaaacatccgcaaattatttttgaagctaccggtgtttattcacgcagactgcaggcttttcttgaagactacggctatgaatatgttgttattaatccgcttaaagccaaaaaagagatgaatatggggctacgctacaacaagaccgataaaactgatgcttatcatttagctttaattcaaagactttatcgccatccggttaatcaaagcgaatcccaaacttataagcagcttaatgctttgagccgcttctatgaccagctgacaagtgacttggtaatagctaaaaatcgacttcaccaagctctacaatcgacttttcctgaaattgaaaatttattttcttctgctaaaggtaaaaattactggcaaatagttgtgcgatatcctcattgtgacttagtaagaagagaagataaaaaacagcttattaactggttaatgagcttaaaggggattgcttttaaacacgctctaaggactgcagataaattaattgaattagcttatcaagcttatccagttgtatcttgctctagcatagaagtcgagcaagtgcagtattatgcacacagattgcttaatttaagtgatcaaagagaaaatttaatcgcaagaatggttaagttagcgaagtctttgcctaatcatgatttagaaaacctagaaagcattccaggctttgcacagaccactgctgtcagagttttagcagagttaggagatttacgcagatttagtaatcctaataaaatcaatgcttttatcggaattgatccaggcagatatcagtcaggagaaatggactctaatttaagtattactaaacatggcaatgcagtcgcacgtaagttgctttatcgagctattggacaaattgataatgcagctaagacaaatccgtgtcatatagcagattattatgaaagcaaaaagctatcctctcaaaccaaagggttcaaaaagatagctattgcttcaattcataaactaatcagaaccatttatgccctgattatcaatgatcaaccatatgattacaacgtagccacacataatcaaaaagactttagtcgtaattaattgatcaagtacattataacgctaagcccaaaaatcagatatggatctgggcttatttgtcgtgtctaactaaaaaaataaatcgacactaaaagatgtttaagttgaaatttaaacaaaaaatgaagccaaacttcttattatgcttgactttacgtagaaaaagacctaaaagtgtctaacttttaggtctcagttcaaattgatttaattccctctttttatttattctattttaagcaccatgatattgaacaagtgaataaatatcaacatcaggtaatttatctctaccgtgtaaatctggcaattcgatgtagaatgcggcaccaactaacttaccaccaaggttttcaattagctctttagaagctcttaaagtacctgcggtagccatcaagtcatcacagacaaccactctttgtccaggtttaatcgcatccttgtgcatttccaaactgtttgaaccatattccaaatcataggaagcacgttcaacttctcttggtaacttatgtggctttcttgcaggtacaaaacctaaacctaactcagtagctactggacaacctacaataaaaccacgtgcttcaggcccaacaattacatctgcttttttactctttgcatattccgctaattcatgagtagcggcacgatacaattcaccatcttgcaaaattggtgtaatatcgcgaaaaacaatgcctttgttaggaaaatccttaacacttgcaatatatttactaaaatcaactgccataagaagcataacctccaaaatgctctgtgtttgtgttcaaacgcttttgaccagtatattttaacaaattttaacgataaaagcactgaaaacagaatagttatctatttatttgtcaaattattaacatatgtaatcaaacgttgactaggcatagttcttagttgattaacaaatttaatctgagaagaagttcccattaaatatttagaagctgtcagcggctgttttttaggagaaggctctcctaccaatttaccttcatccaattttacaaagcctaattcaaagaaaactcgtaaaatgaaaagcacactatcataatctagtcccaaataaggtgcaactgtacggtaatctgctggctttaacgtagggtgactataaatatattttaaaacagcaccaaaataatttttagcgggaatttgttcaacaggcaattgatcaagcaaaaagcgtaaatagatttgttgataatctttctccaatgcagcatttaattcaatctgattgcgtggcacatctaataatgcaactgtttcaccagtttgatcataatctttaactaaagagatcttgtcttcatcgatctgtagtcggttgcgaacaatcggaatatttttttgatcaaataacaggtagcggtccgcgaaacccataacatatttctcttggcgtaagtcaacaactggcgttggcactgccaattttggtgaagcaaaagctagtccggtcatgattccttgtaaagaaacttgatttcgataagtatttaatgataattgaacaaaaatttgagaaataaacggcaaaagattattattcaaaaagcctttattaaatccaataactgataagttaccgccttttttagcaaccgtaaatttgacatgattcttatctttacccattttaaagaaatgagtgattgttggattagagatactaaagattggctgcgtgtcacctgtcccaaatggacctacttgattgatttgtgctagtgtctgcggagttaagccctgcataggcaattccatgtcatattttttagtctcaagaccaccttcaacatgaaagtcatcttcaaatttttcccgtaatggcgcaatctgattttcttctaatgataaaccacaggcaaaatcatggccaccaaatttggttaaatattgatccttgatcggatttaaagcatcaaacaagttgaaaccagcaaaggacctacctgagcctttaacctcacctgcatcatttttagtcaaaacaatcgtgggtttatgtgtcttttcaacgatcttattagctactaaacctaacacaccttcgtgaaattcagggtcatataaaaccaaagtattttgtttttgccagctatttttatgaattaacgtcatacatttgtcatagacttcggtggttaattctttccgtttattgtttaattcttcgatcttatctgcaattttttgggcctcaaggtcatcatcacttagcaaaagctcaactgccaagttggcattatctaatcgacctacagcatttaatcgaggagcaatattaaagccgacatcagtttcattaatactgcctaaagtcaaaccagcatttttgattagagcgcgcaagccaggacgatctgtctgattaagcatttctaaaccacgcttaacgataatatgcccctctccggtcaccttaaccatatcgccaatagttccgatcatagccaaatctagcagctcaggcatagtatcctgcattagaccacgacaaatcgtgtaagctactccggcaccacaataatcatcaaaaggatatttttggccaggataattacaatgaacagtagcataagctgccggtttcttttcttgaaaagtatgatgatctgtaatgattacatcaacattatgttcttgagcatatttgacttcctcgaccccagtaacaccattatcaacagtgataatcaatctggttccatcagctacaatatcttgatagcggtccatattaggaccatacccatcattgaagcgattaggaataaaataatgaacatcagcgcccaaaatgcttagggtttcagtcataatagtcgttgcagtaattccatcagcatcataatcgccataaattgtaatcttttcgccgctatcaattgcttgattaattcggttaattgccttatccatgtcatgcattaacgctggatcagccagattttcttctgttgcattaaaccaaaaatcaagtttttcgtctgtattaataccccgcaatgcaaaaagtttggctgcaatgggacctagttgatatttctcaatcaagtctggtgctaattcatcagctgttctttcttgccatttcattaattatcaaacaccttatgttctctcatcaaaacgaaaaggcactcattgttgagtgtctttattacaaaatctatttataattttatcgcaaatctaaatctgattaaagattgtaaatttttattttaatttaaaaaccttaagattattgttgttagccttttcagttttaatcagattaccccgaattgcccaacgattcttaccgccatcagcacaagtaatcaaagttacaatattcttcttagtattatcgactagccaaaccgcagttggatcaacaatctttttcatataaattcgatagacatatactttgttaagattagttaaataaactaactcaccttttttaacatcttcaagtggtgagaaaagaataccttttgctgtcatgtagtgacctgcaagaggataatttcccttacccattacttggtcggctcgcatcgtgccgccaccagtcgacattgcatcatcactcatccccaacataatcggtaaatacatattaacatcgggaatagctaacgcaccaatcgcaccagaagtctttttcacttgtgatcttgctgcttgtgcaatgcctaaagacttaactttactaaaatcatacattccttttttctttttgttttcttcaattgtctttctatttattccacttaaagtagattgttgattatgatgaattaattgatcactgatctgtttgttaaatatcaaagcaataccaacaagcaataatatgatagcagcaactctaagtaaaattgtacttacactattttttttatttttagccatttttatttaccgttgatgtcaatataaattcttgtactatcacgtctcatacgttaacttatagtccttttcgttttgatttgtcccaacagatcacattaaatctgctgggtattcagtagattttcagtagatttttgataactaccaaaccgcccacagccaagctgtgagcggtttttgctaggccgatcgacttgaaaatcctgcattgcaaccaaaatttattatagcacattatttattctcattttggcagttttctaagatcatgcaacttagctagtaggtgtaccctctcccatgctattttttaacttttcaggatctgcacgccaattttttagcgtttgatttggaccgccttaaagctatctataaaatcaggcgactttacaagcaccaaaaaagcttatatactgaatctaaccatatagacagtatataagctttaatttgccactagtgttactccctagtggctttttttataagttaatgcaagttttcggagaatttcatctaaaaattcagacggtacactgcatacatacttacattctctggctttcgaccgataatcaattgaacgttcatgatccagctctaccctgccgtgaactggcaaaccttctggaatttcaacgtgtagtggaaattctttttcgttagtagtaatagcaaccactttgatcactcctccacacatcatattgaaatcatcgtttgacacgacaagcgctggacgatagcccgcttgttcatgtcccttggttgggtcaaagttcatcatgataacatcaccttgatggaagtcttttctgctgttcaaattatcacctcccttctaataaggacttctaaattaaaagacttcgcgcccaactggtccgccccagtcctcttctttggacttgccaggattttctttttcccagtcgctccaatattttttatagtcaaagcctttgaaaagctcttttaagctttcaggctctttttgttttttcaaaacgatttcattatttttgttaactgttacatcaaatttggtcggtaattcattgatgccggctttgcttaaaatagttttaggcagtcgtacggctagtgaattgccccattgtttcaattccacattgcacattgttataaatctccttacaagtcttaattaaacctttttatttagtatatacttttgtatctacatttgcaataaaaattaaaatataacgcaaaaaagccaccccagaggaacaatcccccgaggtggctttatgcacgacatttggagcttttacaaccccttttcttttttattatggataaaattacggataaattatagctcattatggctatctatccatctttgtaaagtttacagcacgatatacgcacggttgcccgtcacatatacctgcttgcctttgtgtagctctttaatctttaaaaagcgtccgactcttccctggatctcgacttttgagttaagcttcaagccgtagaccttgcctgcgtcagcctttggtgcgtccagggcgtgggtgtgaggcagaacaatcttagcgacagcgtgttttgagtcgttatatgcgatagggttagcctttacgtaaacggcacgaccgtcaaagtattggttcttgccaaccttcacagcgccattttccaagccaaacacctgccacatggagccacacggttttagcttgtcagattcccgcttgtctaactttgaactggtgtagacataagcaccttttgaattagatactactgcgacagcaccaatattccacttcacaacgggatgcagagagagcgattctacgctcttgttcgttgatttgggcttagaactacctgaattagcctttaaatcgatcaagcagatattaccgtcaacgttataccccttatagttatcggtaaattgccagattgcaacaccgtccatggatgggaagtaattaaagtcagcggaatcttgacgacccatgactttatatgaagctacccataaacaagttccgaatgactttacaattcgagctgtgttgagccggttacgcaaaacataagcgccagcatagacaagtggcttataccctgcttccttgatcacttgcatagctgctatgacagcatcggtgtttgaaccgacagagccgttgacgtcgttgccgctgccctgctcccagtcgtcagcgatgtagctaccagctgggactccgtaagccttagccttttcaacggcatacttagcttctgcccgtgctcgtgtgaccgagccggaatggttggcatagaaatagcccatggttagcaagccatgagcctttgcagatttaatttgcgcttttgctttcgggttgatgtatccagtaccttgcgtaagctttacgatagcaaatttcgcacccgtgtagctaacgttttctgtctggaagctggctacgtccacaccatagcttttctttgatacgattgagcttgacatctttttcaccgcctttcgtttggttgtcaaacgattcaaaaacgtactcgttatacgtcttagttcttgtcatcattgtcgtcacctgatacaaagccaattggttgggcgttggtatcttgtgtatcctcttgtttggcttggtccgctgtcatttggtcataagcatgttggacagcacccttggcgactgtttcggtcactggcttgttttcttgcttggcttgatcaagtaaggcttgtacagccttgaccttcttttcggcaccagaaatatccagcgttgcggcttcgcttacgacaaacttagcaatctcatcaatggtcattacttgctttggaagtggtttagccgactttttggcaaagtattcgatactagtagagataccgacacagatagccacgatagccaaaacaactatttgtgtgtaagcagttaattcagtgagattcattattgggtcaccttcttagtagtaagtacgccgctagtgatgtcgcccgtcttagcaggggtgtagcctactggcttatcctctaccgctggcttggttgcgtctgggtccttgaccatggtttcgtcttggatacctgacaaatagcgcacccacttggtaactgcacctttgatgtcttgtggcacatcgtccaaggttaaaacaccatcttgcacaagagtggtgtagtctaaaattctagtgtttggtttcattttcggataactcctttcgcaatttttcgttttccctgcgtaattccttattttctttaactacagcctcatagtcgtctactaaaaagctatggctgtcttgtctcgtatttctcttatcacttagatatgaagtaaacaaccccaacaggaatggagctagtacactaagtacgtctttaagaccttgcaagtgtatcagctcctttctcagtcctgtgggtcatactcataagcaatctgcataaggttaatgattgcgtagatctcaaaaacaatagcagggtggaatctgaaatagccggctccaacgatgtgaaagctttccgcaaccagcagaactgtcaagaatgctactgacacgcctagaccaactttgatgattaactgtacccgaatatcaaaaacaccgcacaaaatcaaaattagtcctgccatcaagccgatactatcgacccagacgttattccacgcaggtgctagacttggtgggtaaaaaaagtaggttcgatctatcagaaagcagaccgccaatgccgagattaacagccctgttttgatgaaattccagcgactaagcttgtggtgcaggttgagcttgcggtgcaacatagtcttcacctgtgactttcttgtaacctgctgcgtccaataagccttgttgaactaagccttgaaagtaaggcttttggaaaagccccatttgatagtcaagtacccacatttgtaaaaataaagcgtttaaatcagtcataattagttacctccgttttcttgcttgttagtgttttctgctggcttagtgtcactggttggtgtagcagtcttagcttgatctgcttgcatgccaaccagaatttgttgcattgaagccataaccttgttggcttgttcttgcccttctgcgaccttttgcaagccttgggtcaatgctaaggattgttgtgtttggacttgttggctttgttgcatggccttcattgcttggtcaaacttatcgttggcttggtcaagtgcggcgttcttcttatcaagttctgcgctcttcttatccaattcttcaatcttttgtgtagcttcttgcaagattgcggcttgaccgtccttggagttttctacccagccattaaccttcaagtcccagacaggatcttttaagctgtcgtctggcttttcaatgtgccagtgccatggaagttctggcaactcataaggcaacgtaattactacgtgatgcatttctgcgttggcagagtcaggatcactaaagtaataggtaaaccccttgttttcttgtgtagcattgttttcttgtgcgccagctactggtgcaacttgtgtttcgtcagccataattggctcctttctatataaaaagcccacgggaactccccgtgagcaaggttaattttttgcataaaaaaagcactcaatgagtactaatactataactgttcccttgataaatacttagtcatgatatccgatgctttgataagcggtgtgtacatcccatcaccagtattaggattatttatccaatgattaatgtcaacaatataatatggaatattatgttgatctaccacaacgcctgtgatttcacccgtagaagctaagccgcctatttcatccggtttattccattgaatcgaatcactattgatagaatatttataataagcatcaatgattccatctctagaccatcctactttatatttactgcaagttatcgttctgccaattaattctgtatttacataaccgacaataatttttgttgtagggtagtagtcttctttattaaacttcatgtgatctagcatacagccaccgcctttctggtggcggctctaagtacttggtataggtggattaacgggctaattaccccccctaagatttccgtacagtccgattttcgaacccatacaggaccatagacggtgctactatctccttcacggataattggcaaatctatacttctcccgactaaataagcggtatttgaagaggcacatacatccagctccaaatctgcgttcagtaaagagtaagtagtatttggaaaatccgtaaaaacggtgcttgttgaagttcctttgggaattttgacctttttagggaacataagataatcatttttattgaagatcatcttttcgatcatagaaccaccacctttctagtgatagctctaaatgcctgacataagcggattaggggggggttacccaccatttcaagttgcgagcttgtgataccagcactctgtaataaaaaccataagtctcatttcccgcgcctaagctataagtgtcttgcgtttcaaatttgtttgtgataaatgcatttattcttctgtcatacccaacgatttgaaaattaatgctttgaacagatttgccagggttaacagctccgttatcatcaattaaaactgacccagatggcaaatatccagatgtaggtagaaaactagcattaaagttgccgttttcgtccgtcaggcttcgccattttttacgatcaaatagcatatgatctagcatttaagccacctccttgcatgagcaaagaagtgacctaatccattgccaaaagcggcttggcgaggttttaccccccccagttttctatgaatagctcttttttaatgatcgctttgtatgctcttccagttgaagaattatagtctgggaggtcatcaacaacgtagtaatcgtcatctgcgccaatgcaacgagcttcatcgccttttttataagtgtgcatgtcaaagggggaatcagtccatttaatcttggaactgtcccaactttcagtttgttcattaaagctataatcttctttaacctctactgttggtgggaatgctacatagcgaatgccattggctttaatttcattgtcgctttgattcacgttaaaccatggaagcttgttaaacagcatatgatctagcatgtttccgctcctttcttaaatagagtgaaagcatactcaaccattgacgcaatagtatgtagaaggcttttacccccccatattacatttctaacatttgttttttcaactacgcccgtgtaatagtaatgcgaataaactgcattattaggatgcttgttttcatcactatcagcgtaaatttcaagttgtccatcaaagaaataaacgtcttggcctgccccaacacaggtaacctcagcatcatttaatactcgccagccattacccgtattcgggtttttgatcggtgtttctgccatgacagtaaatcttgatggacaagcataatagtttttattattagctgtaatagcggacatatcgtttgaaatttcaaaccacttttttacattaaaaattagatgatctaacatgctttcacctctttctatctatctatttttcaatcatcgcaataccgttagggtttgcgttttcccactgctcagcttgtgcttcttggttcgctgggaatcgcttgccttgcaggtagttttgtttgatgtagttgatttgattaatcaagtcgttaacttggttttgtaatgtggtaatcgtattaagtaagctattaatatccgacttccaagcgatgtcttcactccaaactggtccgttgccattaccgccagtgattcgagcttgattattatgataaccaacgcttagaacgcctttcgtatctgcgccaccaaagccaacaccagcagcaaagtcattcaataatggaccggaaccacctgcatcaattctcaatgaagtcaagacgttattaggattaccaaccccaaaaatatcttgccaactatttgagttttgaatctctctaaacagtggtgtagctatgttgtgtttggtgttgatctgattttgtaaattagagatgtcgatcatttttgccatctgtcgccagggttgccagttattatcaaccttcattcgataaaatggagagtcatcattatcagggtagtaagtttgaacaattctatgatcagcgccattagaaattatcagcgtaccccagatgcccccataaggggaatttttccctttttcagggtttgtcacatagtaaggacctgaatcggtcaaactatcaaagtctggcgaatttgcggttcttgcaccttttaagttgttaacttgactctgcaaattgtccgcccttgatgtagcggcattttttgcatcctgcacttgattgttaacgtttgactggtcagccttggtgttaaccttatcagttacatccttgatttttgcatcaacgtcagcggtgctgtccttggtattggctaagtcggttacggtcttgactttgctatcgacatcaaccgtcttagcatacggggtaaagtcgattttgccgatttctgcgtctaccgtagccttgtcagccttggtatcaacggtttggctcaacttattaagactgtcttgacttgccttagtgttggctaaatcggtaacagtcttaatctttgcatcaacgtcagtcgtgtcgtccttggcgcttagcaacttatcgacatcagtcttgctataagtcgttgcttggtccgctttggttgctaaactgtcattgactgccttaaaggatttgtcaacgtctgccttgtcagccttgcccgtgatcatgtccgccgcttgtgtagcgttgactttgccattggtgtcggtcgatagggctaaaagcttttcgtccagttgtgccttgctgtatgagtagtcggcacccaccttggtggctacttcatcgctaacagccttgatctgttcggacacgtctgccgtcttagcgtacggcgtgaagtcgatcttgctgatctctgcgtcaaccgtagccttgtcagctttggtggcaatcgtagcatcacgactgctaaaagcatcatcaacctgctttttggtgtacacatcgctagaattagccttcgtagcgagttttttatcaatgtcagtagagttagccttaatagctaactcactctctacggtcatcttatccgccttggtgtcaatccttgatgtcagatcgtgtgtagctttgttgatagcaccatttaaagtggctggtgtaactgatccagctgggtcaaccgttgccgtgacattcgtagcgtcaccaatcgcaatcgctagctttaagtcaagtgcatcagtagcaataccatctggactggtcgctgttagataagcgccagtattggcaacagctaccgcaatcagcttttcatcattgcctttctgtgcaaaaaagccaaccgccgtataaggcaagtcgttggctagattgtcgttttggaatgtggcttcaaggattacggttgtaccgcgatcagtgttttgcttgtcgctaataccaactttgacttctctaagtggactaccaattgtagtaagtgccttgacttgatcactagttaagtggctaatgtcttgaccgtataacaccgccttggtgtaagtgacatcaccaccagcggtcatcatcgttcgcccggcatctgtgatatatgctgggtctctgattgtactcattcaatcacctcccccttacttttcaatcattgccaagtagttaggatgttggttctcccaagcttctgcttctgcttcttgactagctgcgaatctcttgccaagaactgcattttgctccaaaaacttaacacgatttaacaagtcattgtacatgttgttttgccctgtgatctgttgatttagactagcgatttgattgtccttgtcgctgttagtcttagtcaattcgtcaatcttagtttgttgggcttgcagcttttgatctacctcagtcttcgcataaaagacaccactaaggttaacgttaccagtattatcaggtgcaacaccttgaacagtattaatccctgcacctttaccagcaccagcgaccatttgatcaatttcttcttttgtgtaggtattcaggttaaaggtatggtttccatccgccttgactggttctttacctcgtaaggtgatagtcgtgttcttttcgttgtcttcgatcttgccgttaaaatcagccgttactttagtttgccatgcattaagctcggcacgagtaacgtatcccacttcattaacagtcatatcgatattagcggcttctgcgattgtcatagacaattgtgcagagataacatcagtagataaaccgtctgggctacctgctgctaaggtctcgtgatcgttagtagtaaaagtgatagcgattaaagcttcatcgccttgtaccttttgattctgttcattggttgagtcaactcttgcataccaaccaatacaactaaaattgatgtctgccggttgattcttgttgttaaagtcagcaattacatcaaagtgatcatctgtaactggcgttaaggttaattgcccttctttgagatcgtccggcaaactagtgatttgacgaattgcttcatcatctaaggcttgtccggaactattaacgggtttttgacttgataggatagcgcgtgtataaaccaatgtgcctacgccgttaccaaccgataagaagatatgtcgcccggcatcggtcaagatcgtttgcttcaatttctctttaaagcccgtattaggatcttctgccatttcttgctcctttctttgtattaaaaaactactcagtcgcaatcgattgagtagttgtagttaatgttttgttcccaatagttaagccagcgtgaatttctgctgtttgtggcttgctccacactgcttttgtcgcccataccgatgatttagccagttgaccaacaacaccaatgaattggcttctagtgctttcagctttccagccggtccaccatttggtatttgatgacaaagtattgtgatgcttgaactgtgtagctatcccaatatattgcttgtcgcttgtcctagccttccagccagtccaccacttaacgggcgatcgctcgattttgcgatgtttgatttgcgtacccatacccacgtaaagcggcaactttgtggtagttacaaacacgatctcatcaatccagtagcccaacgctagcatgtgttgtaagttgtctaccaggaaacgttgaatataaacatcgttgatatagtcccacggtagttggataccgatatgacgtggtgcagcggtattccatatcttgatatcttgtgtagttcctaatgctgtacttgtaattttgacgattgaaggaattgtgccttgagcacgtgacaaaagaacttttaaacgcagtaagaatctatatggatcatcttccttggtaggtctcgatgtgctaaggtcttggccaaagagatcaagtgtcgcaccttccgcatcttggatagcacgccacttttcaactttgttggccatgtcactgatctgttccaatccgccattgtatgtatcgaacagcttatataagttacctcgatggtcttttacccaatgatcagatatttcagctagaagttcatcagttgtttcatacgccatttatatccacctcgatgttattcgtatcacagctaactgcttcgttgatgtcattaacgatgtcattaccaccgagcgtgccttgatgagtgccaatcatgatagtagcttcatcaatgccattaacaccgtagacaagtggatacaaccgagttaagaaaagagttttaccgatgatcaaatgattgatatagtcggccactgctgtcttaatgtcgtctgcaccttcgtcatcgttccagttttcgttgacatttactttgactttcacatagattggcttgtcgatagcgtgatcgaagtgtactgtccgcttgttaccggtagcatcttgtacatcgatagcctttgagccaacaagtgtgatacctgctgcttcatggtttacgattgtgtgagcaatctcgttatcatcaccgcccagcacatagatatgtactgaatacggtggattaccccatttatctgcatctgccttatcattttcaactggattaacgtcacgcacgcctggcaactccatcagtgccgacgtcattcccaaagcagttggaccaggtttagcggcgttttcttcgagcaatcgtgctcgatatgtttcgtcgtcttcataatcttgaccaccgccagcaggctctggattagtaattgacagcacattatcgtccggattggattccatcgtaattttgttagcagctacgttgttcatcgagccgttttcttcactttgaacgatcccagtacctttccatgtaccgtccggctgctgtgttgtcgtgatgtctttgatcaaatcaaacacatagccgtcgtcagtttcaaacgtctcaccggtttcaatcagatattgcccatcagtcgttacctcgatcgtggcaaacgccggctgcgcaactttacgaccaacacccatgtttgagccaacacggtctaaactggtatcagttgctgtactgataaacgctgcatagtaattttgttgtagttcttggatcatcagtgtttcacgccaagcaatcagtctggcaatgatgccaaagttagaattgcttgttaggacgatatcatcgccaaacttgctaatgaaatcatcttctacgctgtccaagacttcttcatacgttggggctataaagccgttttcggtaagcccccagctttgactaagtggcaactggcaaacctccttccactgtacttgttgagccatcttcatttttgacggtggccacgaatgtaacttttagacttcgatgtggtcctttgatgaaccggattgagtcgacagcctgcacttctggcacatcagcttcaatggcacttgtcatgtcagctgctgcatcacttttgtcgaaatgcttgcctagaaaatttgagtagtcagctcccatttctggatcaagattgatcatttcaccgtatctaatctcaagggttgctttgatgcgctgagctatttcatccagcccatcaatcatcgctagatcatgtgtgtccggatcaatgactaagttaccgtcttgatctactttcaaatctttagccacttaaccacgaccctcctagtactccgattactacactgtcgttagcgtcgtgcatacgtccactgttcggagtgtatgtatctgtgctaccgccccagttatcgttatctctatccaagacagcacagacgaccggcacaccagctctcataaagcggcgctttggcaatcttttagtaaattgcgtatgactatgctctggaagtgagtgatcactgtcagccttggaaagttccggctttagtgcatcagccatttcatcaaacatgtagcagctctctacaactggaatatcaagatactgtgctgatttagtcccatctgaccagttggccagcggtaggacatccgcacggtgttttttttggtcgtagctaacaacttttgcaatataaaaagacttgataccagcgtagattccatgctcaaatttgtggaatccgtgataccaagccttttttagctctgcttgtgagctagaatttttattatgtggagaagccatctgtgacctccttacattgataccagagagcattgcgtctgtggattttcaccgtctgacgtgtgctgtccggcttttacataaaacttgcctttaagatacttactcttcatcaaaataccgacgttagttgtgatttcgggtacaagcggtattgtaatctcccatgtacccttaccatcgtcatcgtctgagttgtcctcattgtaagacggtggctgaatcaaatccttatcatcaatcacataccaagtgcgtttcatcgctctaggattaactatttccagcttgccacgcacataagtcatctttgagcctgtatttttgagtaggttcttaattagtgtgagtggcttgcctttagcagtgaaaggacgcttgattgctgggtttttagccagatcaagcttggatatcttgatgccggattgactagcgataccttgaatgatctttttgtacgtagtgcccttacggaagactttattaacctgctccgtcttagtacctctgtacttaacgcgcttgttcttcgtcttgcctttaaccagcactgctttagatctacggtggtgtttaacgtacttctgacctttctttttgccagttttgtatgtctcgaccgtggtccagtgctcccaggtgtttttatagtgatctttttctttgaccttgacggtcttatacttgttgactttctttttcttggagatctttagttttctagccttgacgttgctgtaatccgtgccctcggtaaaactgataacttgcgtatcagtaacgccgtcgtgttggaacatgtcgatctttgagataaatccctcagccagaatctttttttctttgccccagttaaaagccacgtagcaatgctgtttgcggtggtaaaagtccttgtgttcttttgccaggttgtacagcgtcactgtgttggtctgtggtgatggggtgtcggaaaaattaacttgaaacccgaaaggatagtcatgaccaagagtctcattgttataaacagtctgtacgccatcgtcactttccgtgacaaaccaagcgtgcggatcctttgtgatgatagccattagacatcaacctcgctatctgtcagatcatcagattgttcatctggatcatatccaagtggagtggcatctgggttttcatcttctgagccgttagggtctttaacatcaatataaatctgtaccgaaacgccaaacttgcccttgccagcatcagtggcgtggccggttgggtcaagcacacgcaagtcagtccaaggcaagccagtgtttggaatcatttcaccaactagattgcctaacagaagtggctcttgtgctaccagcactttgccatctttcatgatcgtgcaggtgtagtaatctgctatgctgttataatcactccggaaagtaaaggcctcgccggctagttgaatgtcgaaaatgtccggcagattatcaacgtcgactggtacataattttccaattatctcacccgaatcttatttttattcgatcgtgtagtgccttttttctttggcacatacaggtgttgacctgtattgatcttgtttggattcttgatgtgatttaccttttgcagccacttaactgtcgtaccgtatcgcttagacaagccccacaaggtctgcccttgcttaatagtgattgcagtgtactttttatttctgtgtccttgtgtccgtttggagcttttagacgacttcttcttgctatttttaccggttgaggtagtaatctcagcccagtacacgaaagtaaaagtgatacttactttcaagttgtcccgaagatcagaaaagctttgttgtaaatcactgatcattaagtgtttgtagtaaatatcacctttataagtaagctggacgtgattattcatccagcttttaagttttttgtacttttcattagcttccgcgcggtcgtggccagtaatgataccgccaactgtgaccgttttaccagcaattctagcgtagtcggcgcgaggtgcgccctcatcaaccggccagctagttatattagccgtcataccttccgattccgaatcacttggagaaataaaaataggcccttggctaccatcactcggatagatagcagcgttgccttcattgtattgacttgatgggtcgatactaaattgagcattatgctgtctaattttatcagcaatcgcatcaagatcacttttctttttttgcaagcgttgacgttctttttcagcttctttgcgagctttgcgataacgactgtacggtttataccgtgcatcaactatcttgtcccactttttaaactttgcttgcagtttcttttgtttctttttgtctttggcagcattcatagactgatacgtgcgtatcgcttcgccttgtgccttagcgtatctcttttgatacttgtcctccaaagacttgtaatactttattttcttgtctgctttttcatcagcagtcatttttttgcgttttgccatatcctcacctcctagtaaacagtttgatcaagaccgaactcatcgccagcgttttcaaatacattggcaatttcttgacgtacaatgtttgctactctatgagcatcttgtgttgaagaaattggaccattgatgttgatattgattactggctttggtgagttaggtctgtgaactttgattggcttgatcttcttaacttttaagtcatcgaacaagtcaccaagtttcttcttggtttgatcatggttatcaatgtgagccttgccgtcggtgctgattaattcaggaccattttcgccaacaaggtaagtacctgaaccatagtggttgccacccttggcaaaaccaagagcctttctaacttgcatagcaccttgaacgtgttgtgcgttgtaaccaccacgctcccattcagcactaaacttgttagccaagcttgctactgatccatgaccttccaagacacttctcaaaattgcactatcagagccttcacccttaacagcaaatgacaactgagtaccagcattcttccaagaagtaccatgacgacgtgcgtatgctttaaggttagtcaaacgaccgccgagccattgacctaaaccggaagcaccaccgccactgttaacagcgcctggatttaaaccacctgattcaaagttccagttacctaaaacagcggcaataccgttcttagttgcacgtgggtctaacttcttcaagccaccggctaatgctcttgctctatcacgtaaatcaccgccaatagaaaaactaccaagagaaccaaagtcatcacctagatgatctttgatccacttgatagcactatgacctaattcttgttttgcaagtgcaatcaaccgcttatcggctttttgtgttttatgtgttggtacagcattgtgtaagcctttaactctgtagtagccataccccatgcctttatcgtcagcaatacgagttacacgagcctttggtggcgtttcgttaaacatggtgccacgtctaggatccttaatgatcccgacatgccctgcggctccggtcccatgcccgaagatgaccaggtcgccagggatagtgttgctcaatgacttaccaaggtacttaacaccggaactgttttgcattgcgacagtagttctaccgatatcgatgctaaatttgcgcagagcctgcataaccataccggaacagtcactgagctttttgcttgcagcacccatttgataaggaacgccactgaatgttgattcagcatatttcaggaactgctcacgagtaccacccttgccagtagagtcaccaatcgcattattgatgatagtccacatagcagtactccaaggattaccaaagtgagttgaagcgttcttaccaagatcgaccgttcctttttgcagaattggtccgctttccttgatgttcttggtgaacatatctgcaaagctcttagcaggatcagccaatgcatgtgaggcgatttttcttaactggctatgacttacaccagatccctttgcaaagtgctgtaagcccctgctttgagctatctgttgagtttgtctgccattcaagacaccccagccacgaggaatcaccaaatgaagatcatttccacgaggcaggtacaattcatcgtttggtgagactaacgcttcttgacgtggaccgctcttagcatcgttgatgactgaaagagtgttttgcatcaagcgaccgttagcatcagaaccttgtgcgaagtgaactggcttgatgacgctaccgttgccaccaaattgtgagagtaccttgtcgatacctttgataccacggttaagttgatcaatggtgtcacccattgcgtccttagcatatgagcgcatcttgcccatagccttaccaaaacctttgctagttgagttagcagtagaaatgacaccatcgtgcatgttatccatctgtttatccacagatttacgcattccggtgtattccttggtggcgttggctcttgttttgctgttgtacttagcagtttggctagtaatcttgcgccaagttgaattgttatggctttgaacagcgttaactgacttggctgatgttctacgaatctttgaccagcttgaagcattgttcttgctcaaactcttcaaagacttagtggcatcagaattaatcttcttatagccctttgatacggtcttagtagtttgacctagcttagtgttgccacttgcataacctttgagagttaagccacgacctaaaccaccagccatgactttacgagtatcacgagcgttaagaatgtgctcgccaggatgaaccttagtaatagcaggaccattagcccctaaaagacgtgcatttgcaccattcttgtaggctaattcgggaccagcttcaccgaccaatgctctatgagctgattcaatgtagccaccagttgcatgagatttgatcttctcatacttgaaggctttaccagagtgaccagcggcacgatctaggtcattaccaaaacctttcagattattagtgatgcctttgcggatgtcgccagctttgccccaaaaattattccaagcctttgaaatagtgctaccaacattaccagcccattccttgactgctttgtaagctttacctaattgacctggaattgaagtaatgaactcgccaagaccttttttgcctttgttccaagctgactgaatactgttaccagtgcgaccagcccagttacttacgctcttgtgcgctctattcatctgacctggaatgccaccaacgaatttctttacgccagtaacgcctttattccaagtcttttgaatactgcgaccagtacgactgccccaattttgaacactcttattggctctagctaagttgccaggaatgcccttgacaaaagttaccgtagctttcttgccacgttgccatacctttgagatattcttgcctgtttgacttgaccatttgccaatgttcttcttggctttatcaaagtttttaggcaagttcttaaagaaatcatgactggctttaacagcatgattccagcctttatgaatgttgcctggtagatccttcacccatttaacagctcccttgaagccattctggatagtcttgccaacgccattagcccatttgcggaatttagaattgttcttgtataaaagtgcaggaataccagcccacggagcaacagcagtcagagctaattccttgccgtttttcttaacaaatgaaccagccttgccaagtgctctacccatgctcttgccgacttgaccaccccatctgccaatcttgctgaacatgtctttagtagaccagccaagattttcaagcgaccagaaattctttggtggctttttgcgttgccagccatgtacaaagctgttaacagcactaccaccaattcgaccaaagagcttaccggcttgtgcaccaagtgcagcaccaatagggccaccaaaaataccgccaacaatggcacctgcacctgtaccgacagcaccaccaatgtcaactgatctcttagctgcattgtgtcgatctttgtaagcttggaacccttgatagccaacatctaatgcagttccgacaccaacagcaccgccaagcaatcgtctgccaactagtgctttacctgttagctcaccaggctggactctgccgagcttgaacatgccaccgaatgaattgcctttcagtgcattgattaagccaccctggcgaaatgatcctttgatgtattgacctgtaaccgggtctcgtggacgtacaccggtttctttgccaaacagtagtctacctataccagcgccaattcctttaccgttaccgataccgaaattagcttttaagaaaccactggctaacttggacgcacccaatgtgccaagaatacctgttatataagcagcagcagttttaactggctttggcatacctcgcatagcttcaagtagcttgttagcatagccaagagccttgctgataccaggtgcgacttcctttgcaaagctcatacccatatcagtagcaagttgcttagttctagctaactggttctgcaatgaggacatattctttcttgacagtcttgaaatatagccagtacgtgcagcattttgagattctcggacattgtgttgcatgtcaccgtagtgattcatcaaaatctgagcatcattgaaacctgtttgaccaaataaagtttgcaggtcggatgatactcgattagatttcttaccacgagacgcacgattcagcatctcaaagatggttcctaactgtttcaagtgaccatttctggtgtacaagctattaggattaatacccaaatcatgcaaggcacctagcatcgcagtactatgtggcgctttgatcaatctagtgatgatctgacgcataccagtaccagcactcgaaccttcttcgccgtagttagataacgtacccaatgcacccagcatagtatcgatagtttgaccatttgaatgagcggcactacccatcatcttgaaggactcgccaaaaccactttcaccaccaacgtcaccggaagttaagtcagcaacgtaagcggctttgttcaaaacatctcttgtgtacttagacatacgtcttacactgttaccagctctggacttatagccaaactgttccagcataggtgcggctgagttaacgattgagttgtaatcttcgttagtagcacgagcggcttgcaagaagtacttgtgagcggctaaatcttgttgaccactgtaaccacgtctgatcagttgctcagaacctctagccaattcgttttgatcaacgccatatctaagagacagacgacggttttctgcttgaatatcacgagtatttcttctcgctgttcttgcactgtcgccacctgtttcttgtaagttcttgatgacgttgtattcatcagccaacttggtagcttcactgttagctttcatgaatgcagcggcaactggcaccatcgcagtagcaatagatgaaccgacttgaaccaatgctgatccagcacctttcaagcgatcccagccactctttaacttatttgatgaactggtagtcttatcaaagctttctctagctctgtcagatgatcctctagcacgatcaaaaccgctacccatatcaccaagtgcttttgatgattcatgagcacggttcattgactgctttaattgatcagttgattcagtagctttcttagccttatcagcaataccagacagatcactttgcgcacggttgagattgttgttagatccaacttgcttataactattggctaaacggtcgatctgagttctagtttcaccagatgcacgattaagcttgtctaagccgttggtggcactgtccggcatcttggtacgtgacaacacccgattaagttgttctgcattggctttaaccttatcaatatgtctatcaactgaatcgaatactgaattattaactctaacgccgatatcaataccaacatgtcgtcctgccatctatctcatcctttcttgtgcaaaataaaaaagccttattaggctctaactgtcctcaccgccaaatgccaacgcaatgccttttgccataattcgtgcttgatctttagcagttaaatatgtctgatatttcaagtcttttttgactacttcccacatcactcttaattggtcgagcgttgcatgattgatccatgattcgggaacaccgtgcattaccaaacgctgtggtaaccacgttgcaggatcagaagccaaatcactaatcttcttcggtgtaagcttccccattaatgcttgatcgaaaccaatcaaaaatcttgttgtaagcatcgtcatagcctccacgcttgtcaaaccaatcgagggagtaaatctttggacgtacaatcaattccttaatagcaacgttcttcatgaagtaggtttgatcaatggcaccaagagcagttcttgcgtcatcacgtaagcttgaagcttttgctacacctggaaaaattacttcgatagtgtattcattcttcttacccttattgatagttaagaaagtaggcttgccagtaagtgaagcaatttcactagacttttcttgcttatcaatcaaagccatcatgtcttgcaaattcttactttcagtagccatttggctagccttatcttcgtttgattggttgttatttacgttttggttttgaatttcttcgctcatagtttttctcctttaattgttaatttctaatttgtaaagcgtgaaagccattctcgatactaacgaccgactaaggattcagtatcaaggttaagtgcgtgaatttgccatgcacgatcaccggcgttttgtgcggcggtgttgtctggcatcttcgagatgtagcagtgtgcggcggtttggtgaactgttgaagttctcaaatcgagtggaaattctgcgcgagtgttagccaattcagtcaacttggcgttgcttggtgaagtttcgttcaagttgacagtcaatgtggcaccggttttgttgttgattgaggcaacagcggtgccttgtgggtcttgtgaaacagtaacattgtcgtggtcgtaggcaacggaaatcatggtatctggcgcaaaaccatacatcaattcaccatcaaccattaaagtgatgtcattggcgttgtattttgccattaagccggtttcggctgagttaaaacttgccatgtgttactcctcctttaagcttttgaattagtgaaagtatcagattgaacagtgccgtgtacgagaacggtgtggatagcacctgaacggtggtatctgaaactcaaaccaccgtagtgacgagctgataagtctttttgactttgagctgaacgtggagtggctgttactgagtaatcacccctgccagttgattgagtttcaccggtgtttgagtcgtatacttcttgttccaaaacaattccttgttcggaggcttgttggaggacttggctacaaatggcggcgagtgcattaatgcctcgttggtcatatggaaccttgtcggtgttttgcaagtacttttggatcttgtcgcccatattggtttttacccaaagatcgccgtggagtgagtcgatgtaatcaccagacaatacccagccttctgatgtttcgccttgcccgcttacttcgatgtaagcaatagcgtgaacacggtcgacagctgccttttcttgaacagtgatttggtcagcagtaatgcccttaagctttctgaacttccaggtaactgagccaactgtcaaggtggcggttgcaccgatgagagctgcatccattggttctgatgagtcgtgaatcaagccgatggtgtagttttgtgcatagaaggttacgtatgcggctggttgagtagcttgcaatactaagaagtgatccttattagcttcacagatgttagatgcaataattgcgtcatcacttggagtggtgtctgtgaattgtgacttatcaaagatcatgaaggtccagttgtaataccagaatgccttcaaagcgtcagcaagcttgccctttggataattcaatacggcaatacggtcagatgctgcttcttgcatgaagtagttgtctgacttgatgtaaattggatcagtcttgtcgtagtaagcgccaactgcgtctgctgttgcgtattcaacgtattgagcaccggtatatggatcagtcttgcgacttaatacgccgttcaatacgtcgtcgggttccaatttgtcaggtacaccagttactggcgcaactggtgtgatctttggtacattgatggtcttgctgccatcatcagtagtcttgcctgtatcgctcttagctggcgtatccttgccggtgcgagtatcagcaagagcaggctttggtgctgtagaagatgagcctgcgtcaacttcatgcaaaataagaagattgccaagcccgataattgcaggtggcttgacaacagtcatttctacgtcaacgtccttaactctcgtaaaaggacgaacgtctgtaatggtttctgccatttgctattgctccttttcttttccattggcgctgataacttcactgtcaccagcgtcgctgagttgtactgtattgatttctgtttccggctgagcttggaagtggaggtcatccggtgagtaaacatgaccgccattggacactaaaaaagaacaatcaaagccgaacctatagtcgtaataggtaccaactctgactgttctgtcgcttgtgttcgtaaaattctgtgggtcaatatccgcttgctcaaagtagttacgataaacactgctttgaaatgcactgtaaaggtcgtttgccatattcatcgcttgaatggcgttgtcagcatgacaatcaatttgtaggtgtgagatgtactggcgtcccatgcctaaccaatcgcctgttgtttcctgttccggcacaataaacgaataagtgacaaaaggatattgtggacggtcagaaactaaattctgatagagcagatcgcaatcaagacgctctttaaccagttgctgaatgatataagtcagcagaagattatctttgagttgaatttccatgttggtgtgcgtcatctcccttcaattcgtaaatgatcaggtttgaatagtcctgatagttagaagagttagtgacttcaaataaaccgccctgtgatggaacattaaccactgtgtgaacgtagtacttcccagatgacagccacattaggtctgcattggtttgagtaccgccggttaaatattgaatgagttgtgatgtcaactgattaaccggaataaccggctcatgtcgtttctctgctgtttttccatcgattaaggtagattgatcgtcagacattaaaaaaccacccacgagctttttttcgcctgtgtgtggtttatctgatttccaaacttcaatgtcaacgccgtaatcgtccaacatcgaagtaacatccatgtaaaaactcatagtgtcctcctatttcggaatgatcttataagtgattttgttaatgagtgccccaccttgaccgccagcatgtttaccgatcaatggattattgaaacctttgttatcgatggtcattggtgcgttgcctggcttatacagcctgcgcatctcatgctgaatgtcagcaacagcgacagcacctagcttgtcaagcaaaccttttcctgtagcatgaccttcaaacactcgttggactccgacctgtgtcaatcgaatgtacttttgttcattttcaatcgaagtcttacgaagaaacggtctggaaggaattttgacttctttcatcaaataaaagatgatcttgaagcctgtatcactgcttgcgtctttgaccgctaggacatgagcaccatttttgccacctggtcggaacagttgttgatcaggatgcttttcgtcccattcactactgctcataggtaagccatcctcaccaagttcatcatttttacttggtatgattaaccagccatccggcttgtgtggcttgatgtcagcgccatattccaatgcagatacaatttcgatcaatcgatcgttaccccagaaaccaattacgaccatgtagcgatttaatatgtcgatttcgtgcttgattgcgtcccaatcgcttttatcatcagtgattttgatactcaatgttgcactactccatatcgattactgccaccgcagaataacttccataagcggtagtagtaaaggccccaaacgcttgaatggagccaatctttgccaattttggactcgtatttacgttccaagacggcaactttttcatccaaaataccctgaccagcagaagtatccatgctagccaagtgcagagccagatatttgatcgctgtaagcgtaatgtcgttccatttaccgtcaactggctgagggaaaccatccgccaatgtgttaacggtcgcatcgtgaattagctctttgagagtgtcgtctgacatgctctgagttaatttaggtgctgcgttcttcaatgcagtgatcggtaccactggatcatcagtgttcatagttcccctcctttagctaattagcagttggtgtattgataccagtaatttgaacgaatgccgatgggtagcgaactgccaaaccaccatgacgttcaacataaggaatcttagtaacaccgtcgtggtattcctgttgtaattgagtcatttccattgcaactggaatttgtgcaatgtccttgtcagttaagcagacaatagccatatctttttgcttgtcagcctttgaagcgttctttgcatgccagtattgaccttcaagttcaggaacagcttgaattgaactaaagtattgagaaaccatgtctctaacagtgatgtcaggacgaagctttgatactgggttatcaagcaagtcaatttcggcttgtggcatcaataaagttggctttgcgtttgcgtaaccaatcaagtgagtaatcttttggactgcttcacgtaagacattacgcatcttcaaggcaccgtcttctgtgtcttgtgccaacttatcaagtgcgtggtcaccatcaaggttgagttgttggaaaccggttgtgcctttattagtgtcagtcaagccaataattctagtgttagggccaatgtccataccgttgaaaatgatacggtcacgacgttcagcaagaccacgagcaacaagagcagcttgatcagcaagcaagttaacgttagctgcttgtgcttcttgaagttccatccatgagtactcacaagctaatgctgattgagtaattggaacttcatattccttgaaaccttcgtcaactactggaatgtcagtgccacggtttgcgtaggcttgtgccattgccttagttgaacgaaccttgtatctgtaagacgtttggattgggtttactttgatagtgctaaataattgcaaagcaactagtggagcagtctttggatcgtaaatagtttgatcgatataggttaattgttccttagttgcaactcccatttgagccattaactaattacctcctaatttttcttggtttcagatgctggggttggcgtttcaggtggttgaattgcgtgtgcatcgtccttggctgggtcagcgctaccggtagtgccaccaaaacgagtgcgaactaaaagacgtgcagttgagcctttatcagccgaacttaaaaaccgaccaactgcatcgtccgcagtggtcggtttaaatgaaccgtcagcatcaacagtggcaagttctccacggtcgacatcttcactaaccggaacattgatagttccatcagtaagaacaccgagaacttcgcctggatgccatttatctttttcaatgtcgtcttcatagaagtggtcaacatctaagtagccacgctttactgcaacgccgtagataggtgccttagtagctgttactgcttgaccgttaactaaagaaacgccagcgccgaatggaatatcggcactagcaacttctgttaagacttcgtattgtctttcaactgtaccggcagatagatgaccgtcgtggtacatggttccatcaggaattgccattacttgttacctcccttattcttgtttgcaaggttgtagaagttttcatgcatttggttaactgaaacattgctgtcagcactatcacccttgaagtcgtgaacagtagcaccaacgaagtgtgattgtttgcggttctttactgcattgaagtaagcattaacgtaaacgtcatccttgccatcaatttcagcggaatcaccatcaacgctcttgatagcttcaatcttcatttccttttcggacttgccgtgaggatcaaagctgtcgccaacgatagacttcacatcatcgatcaagcccatacgttgatcaatcaacttgtctaaaccgtcgccttcaaccttgtcacgataaccttgcaattctttttcaagactatcggctttagcttgtgcttctgacttgtcgttttcagcttgcttattgccgcttttcaaagaatcacgttcatcagttaatttcttgatttgtgcgttaagttcatcaattctcttttgatttgcttgattgtcagagtcaaacttgatcaacttatcagcatcatcggtagcgaccttgattgtttgatcgccaatgcgtaccttttcaaaatccatttgtggtttttgccctttctctttactaaaatcgtccagctcaccgatcatttcggcactatcgccgacaactgatctatcaagtgagatgtctggaccttcccttgccacatcaacaacagcaacgtggttgatagtgatgtctttttgtactgagtcatattcagcattcttgtagacaccgctttgaggcacgacctgcgtttgaaagccaatactgagttgacgcttgccgttatcgaccttgttaatcaaatcagggttggtaatcgtcaaatcaactcgaactgtgccgtctgcctcatctacatgggcattcgacgcagtaagacctttcatcaaagtattcgtgttgctcttatcaactaggattcgctgaccagcttcattttctggatgattgtcagtgattggcttgttgtttgcactcgccaccgtgctgtcagacaagatatcctctggcagtttggcttcatgacgaacagtgccatccggtttcaggtatttaaaaacgccagctcgtgcgataggcacgtttctggcgtgaatgtaacctgtaattggatcctttgttatagcgctgactgttgatgagtcgtacctcgtaatcattacttaccaagtggtacgttgatagcttgatcaggaatgtagatcacttgaccagccttaacaactgggttggtcttggataagccgttgaagtaacgtagttgttggtaggcaactaagacttcatttgcaacatcaagtaaggtttgaccttccttaactgtgtaggttttgcaatttgtgtaatcaaatccattctttgccactcgtttcacctccttttttggagttgattgagcgtttaacgcagttttttcgtgattaactgctacttctggcgcatcttttgtggtttttggtgcgtcaactgttactttctctgagttaataccgaaaagtggtttgttatctgtcatgtcttacctcctaataaaagctaaatatcggatcagccacacagcggcagttgattggttcgccaggcatctgtccatcatcaccgccagttggatcgtcgtaggtttgacgagtgccatctagttcttgatgtttgggccgtactcggttatcttccattgattgccagacgtaatcttttgcgcccgccgctttgtgtcgactctcattgaacttagcaagcgctgatccggtttgatcattagcaacaagtgcagcatgtctgactgacataccagtttgtttaacgatttcttttgtaattacaccggtgccgtcaccatttgagatagctcgtgagatgacaccagtgatgctgtctgcatatcgatccttcatgtacttgatcagttggacgttctcagcaactcgtgcgttaaatatcttggtcaattcagggctatcacgtattgggttgataccagctatccgaatctgcattgcaacgttgttgtagctaaacatatcaatcgttctaacaaactgttcagcaattttgcgaatagttgcatcactagtggcttgtttgatcgtgtagcccatagcatcgaggttatgtagtacattctgttgttctgtttcagtcggattgttctttttaggtgcatcaccaacaatttgagtaccgcctttgaagtagtcccccatatagacgttgaaatactccatagcgactttgcgccactgataaaccaatctaacgatgcgtcttcgataagcatcttcaagattgcgaggatagcgagtgtgaggcattcttctatgagtcgtcatgtttctcagctcgtttcttgtctttttgatagttatccacaatgttctttacagtttcagcatcaacgctgtcgcctgctgtctgcattgctgggttagggttggtgtcttgacctgctagcatgtcgtggacttcgtccggtgcaagaacgccgttagaaatcaaactactgtaagcattagcttggttcatgaagatttctgagtttgtcttatcgtccatggtttgtaagtcattgaatacgatcttccaatcgagttgatcaggatcatcaccgtttgcgtacatcaaaatacgagtgatctgttcaatttcaggctttaacaagttggtctgaattgccttgatgctgtcgtagtagttgatgacatcttgtgatgcaccagctaatgtcccagcttgttcaccagttagaacagattttggaataccacatgcagcactaagctgttgccatacgaagttgtaaagcaaatcaataccgccggttggtgttgctaccttttcaatactgtcttgactatgaccaaacgccattgcttctgtattaagtacttggctaatctcacgcttatcacgtttaaagtcagcgtctccttcttccatcaactgatcagacttgtaaaacttgaatgtaaattcacgtaacatctttccagtcgattcaagtgcgatatccattgctttgagttgatcctgacatctggtcaagattgatgtacctgtttcatcatcaatcgacttatcaagtgcaatgtgccaataccggctttgatcaataactcttggagtgtttctcggagtattcggcgtttgagtaccattaggatcaactttgtaacctgcgttttgagttctaagtacgatcgcttgctctttgccataattaggactgagtgggtcatcattgcttagaactttgtcaacatggttttgcccgaacgcatgaatgaagtgaactttttcaactgtggttggatcaagtggcttacttgaatcagcatcatcattttcattaacgccaatagtgatataaccatcaccgccttcacgttgataaacaagttgctgagacaaggcttgtgtggtcttcaaatcataatgaagccgttggtacatcttttggcgttctggatcgccttctacgattactcggaagccatttctggtagcatcttcggctggtttatgaacgatacgtcttgcaatagcattgtgttttgtctcattgtgcagtgcatcgtagtcttgttcatcattaaccactcgccagcctagattgtcataactggtaaacggatcaaggtcgatgccgtcaccaacaatggttctctttttcggttctgattttcttctgctaaatagtcccatgtttcctcctttctaatatctgattactgggccacggttagcgttagccgtgagtcgttgtattgcgtataccatgctgtcaacgttgtcgtcgtgctgcatgttcgggaaaccgacgatctcttcaagccaatcttcaatctctgggtgccacagtgggtgtggcagatacacttggccagcttcccatattggtgaaactgacattgcacgtgcttccttgctgtcattgcctggactaaccgccatgatgccggatatatcgcgttgcaagacatcgagaatagctgggccattagccttgtcctcgacaagaatcgcactggtacgcggatacatgttcctttgctgattaatagccgtcatagtctggataaatgacaaacgcttgtgacaccaaccaggtcgcagataaacgttagcaccacgacgcgaccatgtctgaccagctacgtagtcgtcattgaccttgtttttgaaggtagcgtcccatgcttgtactgtatcgtccaagtgctttggcaagatggccacgtctttttcagtaagccccagccgaatcatcgtttcacggctgtcaacgtaccattttggccaatcacgcttgaagatgttaccgccctcgacggttggcgattgctgatacaacgcagtaaagcgctgtgtacccatgtcgtgcttgtgtgtgagtagttcttttagcgtatgtaattgagggcacagtgcttcaccgttgtgtcgtccaatcgcatcagtttgaccggctggaatatccgttgcgattgctggtaacttgatttcttcccatttcagtgacgacttctgtaatagccgtcctgctaggtcgtcctgctgccacctggtcatgatgacgataaccgaaccgcccttttgcagacgtgggtagaacgtgaggttccattcattccaaattttatctttgatcgttggtgacccagcttcttccgcatttttgatcgggtcatcgatgatcaacaggtcagcactcataccagtggcaccaccaagcactgacgtagcataaaattcgcctcgatggtctactatgctaaatgtcgtagccgtgtttttgccaacagtcagccgtttgttctctggtgggacagccccacaccattctgaaaaagcacgccgattacttgccgcaaactgactatataagtcctgcgagtaggcaacaatcatggcgtgcttgtctggatatttcattaagtaatatgacggaaatgttttggtaatggttaggctttttccatgttgcggcggacaagaaattacgtagaaatgctgttcaccgtctgcaattttttggagcttgtcgcagatcagtttaacgtgcggataaagcttcatgccaggattggctaatgtgaagtagtcagcatagtcttgccatgccagttcttcctttgcggataatgctatgccgtttttttcagcagaagtcaatttaatcatcgtcttcacctgcaagttttgctaactttcgtaattcatcaacactaagatgtgacatcttttcacgagttttatcggttaccgtatgcagttgctcagcctgtgcctttgccacgctggcctccgcctctgctctaactgcttctgcttgtgccttcttaatctgagctttaacaagttgtttgctagattcactgtttagcatttcaccattatcgagaattatccgaatggcttgcaaaacgtctttatcttctccatatttcaagattctgtttaactgagttacaacttgcggaagtagatgaccaaaagcatatgtactgtactcaatctgagcctgctgaaatttaggatcatttttccagttttcaacggtattaatatgaacttttacttgttgtgatacctcttttaaggttttgccattaaaaagctgtactatagccttttgacgttgccaactaagtttgtcaaattcactatttttaccaatttttaacaatgcttttagtcacctcctcactaaatttgagcgtaaaaaaagacgctacctttgcggtaacgtctaaaataattcttattctttatatttttccatgtttttgcctacttgtaaggaatgccaacggcatcattaatcgttttaaagtaggtattgccacttttatctgtaattgctacagtccaaacaacgtttaacttagcaccataagcgttttctcttaaatcatgctcagtgatacgttgattatcagtttttccatagccgttgattacataaaaactagtttcattttcgttaatcgattcaacctgaaacggtagcgtgtaaccatcatttttagaaattgataccatgccgtgcggtaattgagagtaactcaaatttactgaatcttgtcgtacggcgttgtattgcgtcttacttgatgaaattgacacatcagaatacacattgttaatacccagcttcaaattaggattatctgatactggtttaagagataagatcaccttttcagtattggtaaaccgccagttatgtacataacgcttttcaatcccatatttagctacaaaattaatctcctcaccattgaaagttactgaatgattgattttcgtgtaactcatagcaggatcttttacatgcttcacatttttacccatcgtagcatcggtttgaccctttaaagcttcaccagaatcctcactacagcctgctaatgcaaaacaagcagataataacaatgctgacgtaattaatttcttcttcatagcagtattttctcccatttatcgataaattgctgtggtgtcatgtgagtttcagcaatgaaccatttttcaagatcagggcaatcatgcgttaagcagtaatgtgctcttagtatctgtcgctccaataatgatcccgtgaacggattttcagcatctcggtatgatctatgcttgcgcttacaagcctgccctataaacttattttcttgcgccatggggtgtcttaatccttccaacagttgtcatacctttcaatatattcagccggcatcatgcccgctttttgtttaaacgccacaaatttaatcatgtctactaccttgttgctggtattgtacttaactaaatgttcagcttctttgaccagcttataatgctttctaagctcgtaatacttttctggggtcaattaatcgccctccacgcttaaatcgctgatacgcatgtctaagacgttgaccacggtcatcattgcattgcgttggatctttaataatttaacttggtagtctgatactcctaacggattgataatcttactatcaagtttcagcaaggtatcttgtaaatgctgcttttcatcggttaatttgctaactaattccttattttgcatggtctcttcgtcctctcgatgtaaaaatgtgctctcgtaatcctcaacacttggcacaactgattcaggtatgggaacaattagttctggttcatcctgcttaatctcagtctctttaatgtcctcttctggtgggcgatactttgattcgtgccaaaaaccgcttctttttggtgtagtcttgctgttcttttcttcaacccacttggctagcgatttgtctggcttatctggtttcttgtgatacatgtttaagctcctaaaaatgcaaaaaaacatcgcacattacgtgtgatgtcttcaatgtgtatttagttttataacagactcgctaggattcgaacctagattactggttttggagagcagccgcttgccgcttagcaatgagtctaaaagccacagtcgtactgtggtttcctaactatatggataacagttagaagggttagaaatgaataaattttgaacttcaaaaagagcatatatttgagccttttacagcccaatagggagtgtggggctcgaacccacgatccttgcaacgctctaccatctgagctaactccctacctgatcaaatgaggtgcaagatgcttgcattaagctactcttttacaatttctggctcttagccttctctgctttatgtcggaatgcagacgtcctccaccgactttgctcacgaaatcaacctcaacggtctgtgccggaatcgaaccagcgtttccgcatagacagtgcggcgccctagacctctggactaacagaccatttgcacgcctgtgcgtgactaacttaaccatttatgtaagaccggttattacctcacataatcgctttattttatacgtcgctagcttcgaaccgacgataggaatagctggactcgaaccaacaaattacgggaccaaagcccgttgccttaccgttttggctatattcctaatataagcagtgagggaatccaacccccgcacgtgaccaacttggtcagcgatataccatatctatggttcctggtgcttgcaacattttcaagtaaaaactcaaaagcaccaagtcgaaattgttaataacttaatttaacgtgcctcaacactactgctctggggcgtaaccccctagataagtaaatcatccgttacttgtgatgtagcttaattattactattgaatgagcgccggttttccacgccggctaagagctagtgaggattcgaacctctgccataccggcatatcgaaaaaagcatatggcattaccagctactagctcataatgcctcgaatgaggcaaagtagtgattataaaatttggggatatggaattagaattgctcttctgcccgaataaacgggctacaacagcatcaggaatcgaacctggtctagggcgccagccgccgttactggttaatcggagatttttaataaatataggtttattaaagactcgtaacagaaaaaaataagttgttatcgtacttcttactccatcattcgaaaaccctgcttcctaaattttcgacaatactataatatagccatttcactccgcttgtactccgataaaagtccgtttaaactccgtttttattttttcggtaaatgtgaagatctttaaagtaggggatgctataccagtctttccatttttcgaatctgtcagcaaattcacacaaagcttggcgctttttgatgtagtactgactatcttcatagcctagttcctgctgaatcttgtaatcttccatgttttgcaagtaagcctcagacaagattttttgatatggagttctgccgccatttctacaattttttatagttttatagattgctttacatgcttgttctgcttccatgatgcggttaaaacttgactcagtatgatttatcccaccatgtgaagaaacgcctgacgcgtccattttggggctagataggtgtgaatcatcaataacagacagatcagaaacatttaaacctgcataattttgaaaatgttcaaatttaaacgtaagaaaattcctcacatttcttgcggtctctcttgcgtcaacctttaaactgtcatctagtgccatttgttctgctctatctgtcatcctcatatcactccattaattaatttatttgctacttatcgtgtttataatccatgccgccgactccccggcaccaaagccattaccagtcttcccgtaagtcaggaacgaatatcaatgttgaccaacacactagaactggcaagattacaaatactattccaagaagcgcactaaacaatttacaatgtggcatccataaaatatataggttgctaataactccaaagcagacaatgccaaatgattgagctacctttaaataccaagtttttcttttgtttgctagaatcatgccaaggctaaaggctgttaagccacaaacatatatagcaactactagcataattaatttaaaatacattgttttctccctgttcttgccatctttatgcttccttgtaatctgggtagccgtaccctatcaaaccttcattgacgatctttacagcatcttcaactgatctagctataccgtgaatcacatgcttatgcattaaatcaagatgatatagctgttgtgcttgactgatacgccccttcggggctttaacctcaataaaaaatacttgccgatcctttaaacgataaccaattaaatctggtgtgcctggcttaactcctctaaatagccctccattttttgttgggatagcaccagcattgagccgaataacagcgcaacgccgccaatttagagtcgcaataatagcattttgaatacgatgttcaggacctggtccacgttttattcttcggtaaatcatctttcacccctactttgcttagctaactctaaaatgcggtccatatcgtcctgaaaacgatcattaggacggtagcttgtaaacttcatctgagccatcatgtcagcaataatggcaatatcatccgtaaggagcttaacgtcattcgcttcaatgttctgcaatgcgccaattctttcttgtgtagctttaactgctaacgcattatctttttcactcttctggacctgaattaatttgctttgaagctctatcatgtcctcacttaggaaatgcatgactttacatagagaatccaagctcttctctgcctgtcgttggtaactattttctacatgtccgaggactaaaattccaataaatacaatcacttgtaaaactaaaacagcatttgccactagttttcctcctttaaacactttaatttacatgaaaaacatgaaattattttcataattttagtaatttgctttacactatcgtaaacgccgtgaaaattaatattgccgttaggatataattcgcaataaggtctatccattatttgctgttcccttctagtaaactcattttttgcttacactccatttcttatctccgacataagttaaaatatctgagtcatgaataactaattcaccaaacttggttttaactgtttcggctaaaactattggtataggattaaagatttgataactatattccttatatccataacgttgaaggaatcttacagtatgtgcctttttaaactccttcaatgttcctcttgttccgacttccaaattatttactgataatctattcaatgtgcatccccttcttgttagttaatttaatttcatttgcagctttgccaatgctgtgaccactgtcttgaatatcatcggacaaagcaatcaccttatcccaatcttcagcattttctgcttgtttaagttctcgtacgtacttaacaataagcaatacctgattatctatttctttcacggttgcctcctactcataaaataaactcctaaactcttcaagaattttcattttgatactcctttactatcaaatagcttcaagctatctaatgagtaagcttcaatattaatgccattagagtattttctggagacaaaaatgaatttatagcctttaataacaacgatcgtgccatatcctttttgccattttccgtttatatctagctcaacagcgatttgatctccatatgcaatttctttcactcttttaattttcattttctctattcccttcataataagaattccatcatcattaagccgcttgcggccttttgtagttgctctgccactttttcatcatcttcctcaaaatactgatctatgaaaatggattcaattttttcaaaggcttcttcaaatgaaattccatcaatatctgctaaagcttgaatttcagtgcgaaagattttttctcttttttcaaagtcctcaatagctgcaccatttagaatctttaaatagtgttctttaaattgtttttctttcattgttggtactccttaatatttagatatccatttatttttagatgctaacagtctcacttcactgcaagcttcatttctatctcctccacgtgttttagcaggaatagtcatgggatatttactgtctgcatcaattaaaggcttgatgtcttcaaagttactttcataagcgcccaagaaatgtagcaaacaatccacatcgcaaaatacaccaccagaaggcataaaagcacgatcaacaaaaatcacatcatcaccattttctagtaatgctccacagccatcacattcatactcattgctcataaatcttaacccctatctcttttagtccgtcaaataactgttgtcggtcatctccaacaatgcagcctatgccttttctgccaacaaattgggcgcatgccatgtcgtcagtagtccagtaacctggctgaggctcagggtgcaccacttcgctaaatgtagctctgataatgatgtccccttgcactactttgtattgtctgccatcaaccaactgatctgccgacgtgattaattttctaagtctattcatttcttgtaatgcctctcaatcttgatttcatcattcagcattgttatcaagtagcctattgggttattcaccaagtatgctgaaacacgctgatcatatactttgctaagactttcaaagtcatcatcagataacatagaaacttttaatctgatttgtttaagttgtcttagtgtaggtctaagatgctgattgaatgtcttattgtaatttctgatagtaaaccataatttattcattcttgaatttatttttgtttcttcttctgatttgtctttagagttatccacagtttcattctgaggggagggtttcgatttattagaagaagaattaatattattacttgtagtattatctcttgtaatattctctttgacattttcgtcaatagggtcttgatctttttgacaataccctattgatctttttgtcaatacctccccttccacagaaacgtatatcctacgttgctggactgttttatctgcagctctaattatttctacttgaatatagcctttctttttaagatgacttatccaacgtgataccgtttctttactaacatcatagagtggagcaaagtaattgtttgaagccgtgcaataaccaaacttgttagataaggcagttatttcactataaagaagcttttcattaggtttaagatctttatcatatctaacatatgctggcattattgagtaataacttggttgattcattttactcacctagctttgcaaatggatctttcttcttagttgaatctttcttgccatcaacaatttctttgatcttctgatcttcagcatcttgagcttcttgcttagccttctctttatcacgatccttaagcaagcctttagagaactcataaatagcgctgatactcttaatagcaatcttggcattaaccgaattgtccttgtctttaattacctgctttgccaattcatcaccagccatagccatagcgaagacttcagttagatctttacgcttgccgttgtaagcaatcgtcatgcctttaagttccttaggagtcatgtaatccggtttagagttaaattctttagcatcagtgtcgtcttcagaagcgatgccgtagatagcgctgattgaatatctacgagcgtaagtaagtgccttaccgtattcctgaggattaggactgccgatgtccaacatataagaaccgaagtcgaagatcgcacctttactattaagcaagtagttatgaataccggtctttccaccatcggttactggttgctgaatataagcgatgtcctcatctgaacttgcttcttggatagctttgataactccgttcaagtcagcatatttatagccataaccttgtttatctttacttggctgtttcagctttctttgaacattaacaaatgcactcatcaaagccagttttgccttcaatgcatcttctggcttcaatcctgagatagctttgaagcaaatttgtccaatccagtcggctgggctttctaataattgcatgattagtcctccaatccttgatattcaataccgttgtcctttaggaaactttgtagctgcttcatttgccatggagtacccttgacttccaacttaagtgagatcaccttgtctttgatctcaccagtttcaggatcaacgtacttatctccttgctttttaaggttgttaagttcattcaacttggttttcttttgagcttcagagacggcatctaggtcttccttgtattcggacattgcattaagtacgaatgacaaaggattattatctagtgctttgatccagtgatcagcgggcaaacctaagctttcagctttttcactgatgatcttgatgttgtcagcaagttgagcttgttcttgctgaatcaaagcaatttgttgatcgacttcagtttcaaacttagttttgctgtaggatttgttgtcccagcttgattgatatttaatttttgtaggatcaatttcagcaaattcacacatcgtcttaatgtgctctaaattattttcgtgtctttcggcttttgccttatcttcatatactttgataccagcactaatttttgcgcttgaatcgtcaattttagccactaacgattccactttatcgttaaaatctttaactggcgcttcagctttatttttaatttcaactttgcgtgccttaattgcttttgtaagcttatttagctttgcgcgggtagacttagcgtcttttaggttgtcttgcgttacatcatagttttcaagactttcatgtaactgatcaatttgatctttcatttggttatatccactgaagtcaatttgtgcaggtgcaaagttgactgggaatgctacagccttttcatctaatttaattaattgattttcgttcatgattagtactcctccatacctaaataactggttaatttttggcaattataagaatcttcgataaacttcaaaagatcatcaccgtagttgctaagatctaaaataaaatcaaaatggttaggtgaaacatcgttgtagtccatttcatctgctaacttgtttaaatctccgttgtaatgatttaaacgtcctttaagaaattgagctgcagatttatagccgtttacgaagtcgtcagcagatttgccaattaaagcctcacggccttcaggcaactgaacaactaatgtgtcagggtcattttctgcttgtatttcaagctcttctaattccttcttgcgattaatttgttcttgtgagtaaagcattgtggtataatctccttagttactttttggtttaaagatatttttctttgtccctttagctctgcaaagctaaagggctttttttatgcctaaaaaactcttgatgtaggctggaagttcagaaaagctcccgctagcaacatgcaaacaattgctattagcaaggcaattttgttggacagcgctaaggaaatgggcttgtctacgagatacaaagtatttaaaaatctgttccataatttcatgtttcctcctatttcttgttgtgcttaatgactaatgcaccaattacaattactaaagccgttacgattgataatgctggcaaaactacgtctggatggttctcgccatacagtacggtctgctgaaccactagaagtggtacgaagatgattgatagaaactcaaggatcttctcgaatgccatgcagaagtaactcagtgcgtgatccagctttgtttttccatactttctttcaatttcctttttagtcatttttctataagtaacctttcactccacgagttttccaaaatttatctaaatccgactttttccatcgtgtgatcccttcaattgtccgagacggaattttgtactttttacgccagcttctgaaagttgtatcgctaactccaaggtactttgctgactcaccaacattgagccactcacgtgaggacagctcgattatctttttcacgtcttttttatctagatttgatttaagttctggtttcatcgagatcacaatggatctcacaaacttagttaaattttcttcgtctagaagctgcatcgtttatcaccttcaatctgctacaattaaatcagccttcaataaggaggtgatttaatataaaatttgatgccgatactataactgccgtgattgctattgctgctataatttctcccgtcatagtaactatcgttaacaatgtgcatagtaataagttgagagaattagaaattaaaactaaacattttcaaaattcacaagataaaatttccactttgaatgatttagttacaaatttcgttgcagctgctaacgttcttaatacatatgagcaaacgggtggctggcaattaaaagccaacgccagaaatcaatttgtaaaaagcggttctaagttgctaccatatctttcacccgattatcaaaaactaatgcaagactggttaaagctttcgcaaattgatgataaaagcgcctggttttcgatcaccaaacacattaataatgaatctgttaatcttttaaatgatgtaaaaaagaacgcatacagtaagatcaattaacaaaacgtacaaataatatggccagcttaatgcaaaacctgtttgctttttgatcacttttcgatcaagcactatagcaatagcacttattgttaaaatcaaaataaaatataaatttttcattgctgaccttcttaatagatcgtggtatcagagccaaattcggctcccatcttttcaatttcttttttagtaatctcggcaacttttgaagctgatatgctttgcatgttggctttttttatttcttctctaacaatctttctgacttcttcacgttgctctggactaaacttttccatttagatcacgctcctgtctcgaattgattcgattccgtaaatttcttcgtaatacttatcagttctgtattccatgaacttgtcccacaattctaggcggtaatacaatcttcgtgctccgtcatgaataactgcttttttgtagggactatgttcacaatctcttgtacgtctcatcaatgtcgaccggctgattttcagctttgccatcatttcttgcttgtcagtaaatccatgatttacacccctaactaagtaattcaccacgacgcttcaattcagcatcgatcttgttggtttgctctgttaacttttcccattcttccttagtgatatcgagtgccattctttgaataagcaagtcgcataacttcgaccacaattctttagtggacatagctgctagaattgtcattttttattacctcctagatagatgtcactcattccaagttgatcacagatgcttgcgataatttcactgttgagatcttgaagatctttgatagttgctggacgtgtaacaccaccgttgccatcgaactctttaaccattccaaactctgtttttgaattattaagttcattgagtgcttcaagttcttcacgtatgtttttgtagcaattcatttcaatcacctcctatgcaatgtcgtcacgttcaatcagtggcaaaatgtcgttatcttttagaacgtcgtagataagttttctacctgcttgcgtccaataagttgaaagactagttctgttgttgcctttgtgatccttatagataaatggcttagtagttacatagttcttacccatgtaggctctgtataaaatccattgaccatttacacgatgttgaatcccaactttatgaagtaatctgttgaaacttactgcaccgtatccgtagtctgctgcaatctgtgaaattgctaatgcatcaggtgttcctaaaatcacatcaaggtaatcagcttttttattgctttcctcaagttgaatgctcaagtttttgttttctaacttaagttgtttgattcgagcatttgaaaattccaatgctctatgcataaccatttctgggctgttccatttacgctctaggtctaggaaatattctctataaagctttgacttttctgttcttgccatcattgctaattgcttagccatttcaatggttaataaataatcatctaactcacgaacagctccgttgttaacaaccgtacttgatgtacacttgtaaaaatcctcattttcagtgaatagttctgaattagttttgaaccatctgctaaatcttccttttagtccaagacctttatgtaagtctcttgcactaacaagttgacgatcgtttttgacttgaactttcattagttcttccattttttgctctccttttcttctcaaaacgggtaactttatttcaaaaaaatatctggtgagatacctaatgcttttgaaaaagccattgcaaaatcagcatcaaacttatatcttccgttaagccttccgcttagtgttggctcgctaatgcctagtttatcagctagccagctttgcttaatgccatgttcacgcaagtattgtttagccaattttcttgcgttatctttcaagacacttgccatccgaccatttcctttcttctcatttcgtgtaaatcgattacagttatataatactacccgttttgagaagagtcaacatatttatttactttttgacaagaaatgttttcaaatagcgaataagaatttacaatatactcgtaaagagaagaaattaaacgcgaagaggtgtaattatgagtgtttttagtaacagattaaaagcaatgcgagaaaatgtaggctggactaagacatatgttgctacaagactgcatcttccattaactacttatgcaaattatgaatatggtaaacgagagccagatatagaaactatcacggcaatttcaagacttttcaatacatctactgattatttgatgggaaagactgatgatcctaattctactgatcgtccctctgatactgctcttacgtgggaggatttaaagacacctatgccttataacggaaagatgccggaagagctaaaagatacttacgccaatattgctcaaagtttctttaaatatcacccagaatatttgaacaagaatcgtgaacatcatgaagattaaattaattgacgagctatctatagaaaacaaagaaaactacgacaggcttataaaatatctgatgaatgctgcaatgtttgattatcacattggtgtagagtttaccaatcagcttccaccacttgcgccgcctatcagttataacaacatgggtcgattaattattatgaatgcacgttggccatacccattggaaattccttttcagttagctcatgaaatcgcacatgtcttaaatgaagatcagcattattacaacttaaatgatcgaaccgtgaatcgtggtgaggctgatgcaaatattttcgctattaagttgcttcataactattgcgatgataacgagtatcatttcgacagttactataaatttgctgaagccttttgcattcctcagaacctttattacctatttaatgatggttgcatagtccagaaccagtaaatcgtccagggcaaacgacaccaatgacgttaaacttcgtgccttattgtggaggattaattatgaataaatttgttaaaatggctgctgtttcattagccttacttggcggatcctatacagtagcggcttcatctactagctctgttcaagcttcaagtatctatccttactcttcttctcactgggataagaaccgaaaagtgagagttaatatcacaaaagtaactttcagaagatacgatgctttgaaagatagattcgttcgtggcactaagaaatattattactcagatgtaattagagttagaaaagccggtgagtttgaaggctgggtattagtcggcaccaaacctggcagtcgctattggtgggttaacacacgtgcgaacaccaaatggtttagagactactacaagcttcataaaaccggctggaatggtaacactcttacagatgaacgtggaaataaattaactgttgattctattcaagtcgttgactttgaagaaagcggactcccaaatactgatgtcttaatcaatggctccttcaaatctaatagaatttatactcctttaaagcctactagttggatagataagaatgtctttgtttatccaagcgacaaaacgagcaaggatactttgttcacacaagatgatcaaatcgatttaagtccatttgaaggaattgatgcaaaggcagtaatgaactctgataaagagttcttctctgaggatggtactgttagcgtatctattccacttacagctacaaaagccagtgacgtttctagttcatacacaatagaagacttcgatggtcataaaaagacttttccagcaactcgtgtaactttaaagcaatacaagccaaactttgactttgattttgaggatgatgaggattaattagaagaatcgaataataatcatttgtatgctataattagtttatcggcagaatggtgccgaccatatgcattatgctatggtcttatttataagtattgctcagaatgttgagcgaggcatacaagttatcttgtatgcctctttttttattcaagtattttggaggtaaagaattatgaaacatagatttttaactgctgcaatggcttcaatcatgttagctggtggcgttggtgctatttctacagctacggcacctactcaaaccgtgcaagccattagcaagtactcacaccactggcactgggtaaaggtaaccaaggaaacaccaatatataaggtcaaggttggacgttatatgtatcaaagtaagttaactcataagacttacattgagaaaggatcagacttgaaggttatgtattccggtcatgactacccatggcgtgtatacggtggctggcgtggtcactgggttgctttaagacaatcagcgaactggttcaaaaacgaatagaaaacaaaaatcctgcctaccctattcaggtaagcaggatttattacacagttggttagaacgttagtttgaaaggatgatgatatatgcctcgtagaaaagacaatgagatctacaagtacaaattgaagtcgggcaaggtcaagtacggatttaaaacgtatattggaactgatccagaaaccggtaaggcagttaagccatctcgccagggctttgacagctacaaagaagcggaagcagctaagaccaaactaaaagaagagggtcctagtaagtttactcataagaaagaacagaaagaaaaccgaaaaacggttcaagaagtatatgagatttggctagaagtttatagagccgatgtacgtgggtctacgctaagaactcggaaatctaattggaagaacaacatagagaaagaatttggaggcgtatatatcgacggtatcgatattaaccacttacaaagctttgctactaaattggcggaaactcatattaattaccgttctattttaaacttattacacagagtaattaagtatgctattctacgtgattggtgcgacagagacccctttgataaaattgtgatgcctaaaaaaacgaaggcaaaaagtaagcaccctgctaataacttctacagtttaagcgaattgaaaacatttcttgaatgtgccaaaaagtataaagaaaaatattacgtctactttatgacagtgggtaatttaggctgtcgcccaggtgaggcactggctttaaagtggaaaaatatcgacttcaaaaacaaggaaatttttattcagcattctatcagtacagatgaaaatggcaacaaaatctatggtcctaccaaaacacctgcgtccgttcgcaaagtccccttatcagatcagttggctatagtactaaaggagtataaagaagaaacaatctataaaaaaggcaatgattttatcttccacaaagataatggcgatttttatgagcgtagcgcaccagatcattggattacgacgctctataacaactatccgctacgaagaatcactcctcatggctttagacacacactggctactttactaaataatggaaaaaataatgcaaacattaaagatatacaatacttgctcggtcataaaaaagcttcaacaaccatggatacttactctcactttacaaaggaaaatgaagagcatgttgcggaatcgatcaacaaattggatatataaaaagagctttttacgtaatttttccgtaaaaagtctcttcactatagttattactgccgatttattgctgttaagcgttgatatatcgacatttattaaattttgttttgcttaatatcaataatatgaccagtcattgccgctgcagttggctgatgatgatcaagatcactttgttttaattctgcttgatacttttcttgtgcattcatcaattaagctccttttccttgattccttgtacttcataacccatcttttcaattgcagctttaacatctactgctttaactttgtctggatccatcgtaaacttgagcttccccgcattgaacattaccttaatttgatcagttccatccaaattatcaactgctttttcaatcttagtcaaacatgaaggacaagtcatacctgccaatttcatcattactttttccatttatctaaatttccttcccattagtttacatgtttaatgctacatcgatttgttttttagaaacttgatgatgatcaagtttttgcttaaacctaattaatcgcatcccatttaagataacaactaaaatactaaattcatgaataaacatcccactagccatttctacataaccagcaaatagaccaataaatagcagtaatactgttaataaagcaatagcaatattttcgttcatattaagaactgtcttttttgctaaatctattgcataactaactttacgtaaatcatttttgactaaaacaatatctgaaacatcaattgcgacgtctgtcccacttccaatcgcaatagcaacatctgcgttagccaaggcaggactatcattaatcccatcaccaatgaaagcaacgtgataacccttttcctgctcctttttaacaaaagcagccttatctgctggcaacatttcgccataaacttcatcaattggtaattctgcagcaacttgcttagctgttttaaaattatcacctgaaagcataactaattttttaacgcctaatttcttcaagcgagttaaagctattttagcctccgggcgcaactggtctttaataccgaataccgctaattgactttggtctgcattagcaaaaacaacaattgaatttcctaaattgcttaaatgatttatggtatgtaataattcctgattaagatgagtattttcagtaattaaattttgattaccgagataatatttttcaccagaaatagtagcaattaggccctttcctttaacggtttctactttaatcacatctgatgcttgattatctaacttggcaatcgcctgagctaaaggatgattactttgttgttcaatttgagcagcaagcctaattatttcattccgttgcccctttagtattttgatcgcactaacttccggatgacctacagttaaagtacctgttttatcaaaagcaatttcgtcaatcttacgagtttgatccattacttgagatcctttaaaaataatgccattctttgctccattaccaatacctgctactgtcgacaccggcacaccaataatcaaagcaccgggacatcctaataccattactgtgattgctagtttaagatctctagtaattaggccaactataattgcgatcaccaaaacggcaggggtgtaatatttagaaaagcggttaatcaatttttctgcatgagatttggtatcttgagcttcttctaccatttcaatgatcttgccaaaagttgtatcctctccagctgcaatagtctcaatcgtcaatgttccatcttcaagaattgtccctgcataaacctgattgccaatttttttattagccaagctagattcaccattgatactagcctcattcagatagccagatcctgaaacaatttttccatcaactggaatttgatcacctgttttaactaaaatccttgtacccggatcaataaaatcgacgtcttcttccttagtggagccatcatcttgcattaccaaggctgttgttggagccattttggttaaatctgagatagctgagcgtgttttcttcaaggtgacttcctccaaaaaatcgcccagcataaacaaccaagttacaatagctgcctcattaaattcaccaataataaacgcaccaagtactgctaatgaaactaaaacatcaattgagattaatttaaccttgatagatgaaattgccgttaaaacaatcggaattactccaataatccccacaaccagcattaacaactggtatggcagatttaaatgtaacaaccattttgatccctctgccaacaataacaaaattgtatttaaaagcaggatttgctttttatactttatgaaaaagcgttgtactttaatcattttttcccctttcctttacctgacgattattatcataaaagcaaaagaactctaaaaacttgatgatgatcaagaaaatcaaagatttataatttaatttctgtcaatatttgtcagtatttgcgactataataatcttcagagaaataatgagcaagaaaggtgacaatcatggttgatattttaactaagcaaactactaatcaagaattcttagactttgcggtcgagcaagttcacaacgccgatatcgttactactcacgcaggcgagcctagcgcccaagtttgcgacttattattgaacaaaaacggtaaattatatatcgcaacttcaagtcaaaatccattttttaaggatttgattgctcagccaaaagttatcgtggacggttacaaggggggacggaacgatggactattgcggtttttcaattcgtggtacaatcaaaaatgttgatcacttatatcttgatgaaattttcgccaagaatccttatctcaatgaaatttatgccgatgacctagaaggtgctaaaaaagatttacgtgtccttgaaatcacgccaattaccgcgggctacttggattaccgtactaagccagtcttcatgcgcaacttcaaattctaaacaaaaaaatcagagctatcatttcgacggctctgattttttgttttttcaattaaaagaagattttactcatgatgatcataaagaccaacaaacaagttgagctgattgcggcagcaccgaacacggcaccaccgcgcttgaagatcaccttgaagttaactgagattcccaaggcagccattgccatccctaaaaagacatatgcggcttgcactaagagatccagtgtttgagcagataatggcaaaaatgtcccgataatactcgttaagataaagccacccaagaaccaaggaattggcaatttctttggcgccttggtatgttctgcctcactttcagtcaccaaacgcttttggtaccagtaacccacgattaaagcaaccggtgctaataacaacacacgtgacaacttcataattaaggagctatccaagctgatctcaccaaacgcactaccagcggcaaccgcgtgagcaatttcatgtaaagaaccacctgcgactacaccatattgtgtgtcggttaagccaagcagcggcttaagcatgatctcaagtaatgtgaacatcgtccccatcacacagacaacggccactgccaaaacttcattttctctttttctttcttcatcagtggtctcaatctgtggtgacacacccatgacggcggccgcaccgcagacaccacaaccacatgctgaaagaatagcaagctcatcttcggcgccaaatttgcgactcagccaataagtaagcacgatcgtcccactaactgcaaacgctgcaactaagattgtcttcacaccagcatcagccaacttggtcaaattaagccgaaagcccaacaaaataatccctaatctcaaaaacttgttggagataaaacccataccacttttagcttcagtctgaacgctctgcggcgtcacttgcaatgcaatccctaacagcaatgcaattaccaaagctccaattaagtttacatatggcaacttagccaagaaaattcctgctacagaacaaaataaagtcattcctgcagctaaccaaaatgatttagttttaattatgtttgtcaacaaaaatccctccatatgtgatcaatttaatttgacaaacacaactcccttaatgatgatgtctataagtttactcttgttttctatctttgacaaggtatattgttaattatttcacatttattcaaaaataaaaaaagaccaagtatctgcttgatcttccacatattgacaaaaaggagtgtacaggatttgaacctgcgcgccaaggaaaacttggttcgccggatttcgagtccggtgcattaccactctgccaacactccgtaacaaaaatattataacctattatttgaataatgccaaaatatctttattatttgtaagtgtcaatgtttttgcggtagcctttaaaccattagtctaaccttaatttcttaaatatttatatgacttaaatttctgcttagcttgcttaaataactattgccagctacctgtgcggttaatgcgccatgctggatgcctaaatgaacttcatgacgcttctttaagctgtcacgggccgctgcttttaattcctgttcagtcaatacagttatttctgaatcttcaaactcgctgctaagccaaaattccagctctcgattcttgatgcagcttaagatcctaagcatgccttctgctccagattttgaccatttcttgccttgccccttaacacggtaggtatacttgcggtggttgctctcgcagcagccaatggctttagtcacagtcagttttcgtttcttaaacggcttaatatcgtcccaatgacgatcaatataattccttaggcgccccagataatcatgattgagctcggtattcaattcatcaattagtcggctttctgcagtggttaggatagttttaactttgtcatagctgtatttgtattccaaagcagaaatcagcttgccttgcaggtcaggcgcaaaatatagcctttctttgattttcttatttaggtgaaagacatccaagaaatgctcatgacgcttgcatagccctacaatgtcatcgaagtctgttttggcatatccagcaccgccatcggcgttgctaagaattacagtatcagaaagatcataagtattggccaggtactccttggcttcgttcagcgcatcaagtcggcttaaagaaacaaattccttggcattgattcgctttctgcgtttcttgcttatattgacaatgccttcacagacctgatagcgatgaaattccaaccggcttttagtgcctttgatcaccacgccatcgccttcaagatacaaaactgggacctttttcttagtgcctgcggcatcatatcttgaatctgcttcttggcccgctttaatatttttcccggccatttttaccaaattgcccacctgcatatggctaatattaaagccagacaggcaattgactgctagagcagtattgcgataagtggcaacgctgcttacttctaagatgtttttgactgctaaaatactgtagcgcttgtatttgtcaaagcccattaattcatccaagggataccttgcttgtttgcctgggcagacatatcttcttctgacatacctaacttcgccaaaagccatattgattgagcgctcattcttcttatcaatctgatagccctgtgctttaaccttggtaatcatttcatcatcaactttagctaaagccaaggccatgatttccttaatcaggtttaagaagaaacagattatttttctttcacgcttaatataattatcttcagactttataatatttgcgatttcagttacaattgaattcataaaagaccagcttctaatgtgttttttgttcttaacatcagactactggtctttttgtttgagctcaagtccaaattcaaaggacttgggcttttttaattatttattcaacttaccgtaaaaaattatacacttagttattattttgactgtctttttgtctccgtaactgctacactttgcagtagtacatcgtactagtaaaagatatagaaaagagaataaattatgtgtacttctattatttttagtccacaagatcactatttcggccgtaacctcgaccttgaagttacctttggccaacaagtagttgttactccacgcaattacgtcttcaacttccgcaagatgccagagatgaagcaacactacgctatggtcggaattgcgcttgacgctggcgattacccactttactttgacgcagctaatgaaaaaggtttaggcatggccgggcttaactaccctgacaatgctacttactacgatgtagttgacggtaaggacaacattgcttcatttgaattcatcccttggattttggggcaatgtgaaactgttgctgatgctaaaaagttgcttgaaaagatcaacatcgttgacatcaacttctccgacaagatgcaagcatccccacttcactggttaatcgctgataagaccggtgtttcaatcgtggttgaaactgacaaagacgggatgcatgtttacgacaacccagtcggctgtttgactaacaacccacaattctcaagtcaattattcaacttaaacaactacgccgacgtttcaccagcaatgcctaagaacaacttctcttctaaggtagcaatgaacggctacagccgcggccttggttcacgcaacttgccagggggtatggactcagaatcacgctttgttcgtgtagccttcaacaagttcaacgctcctgttggcaagactgaagaagaaaacgttgataattacttccacattttgcattcagttgaacaacaaaaaggccttgaccaagttggtcctgacgcattcgaatacaccatctattctgatggtaccaacctcgacaagggtatcttctactacaccacttacaccaacaagcaaattaacgttgtcgacatgaacaaggaagacttagattctgctaagttaatcacctacgacatgttgactaagccaacttttaaccaccaaaactaaataattaagaaataatgttaattttgtctaaagattagcattatttttatttttacggttaaaatagatgtacttattaaagtaattggggattttcttattaatgaataattattttgtgttgctgctttcggcggtaattttactctggcttatttttaacatcaaaaattcacgtcgttttaacctttttgaccattggttacaccaccagttggtgaaacgtcacgacggttatagttggcaagtcatcgccttcatcaatgatcctaagttaatggtagtttgggatgtgctattagcaggattattactaaatgaagagcgtaatttgactgccctttgggtgttagggaccttgggctttgcggatatttctggtattattttgaagaaattaatccgtcgccagcggccactaatgcattccgacaaggaagatggctacagctttcctagcggccacgtacttggggcgacaaccatggggttaattgttttgcaactatttgccaaggatttaggtaccggcttcgtcattgtggtcgttgcactatgggccatggtgatcttctctcgtttgagtttgaaggcacactacccctctgatgtattaggagcaaccagtttagccatcgtttgcttcagcatttcacaacagctatttttagccatttaaaaagatcccgtttatcgcgtgatctttatttttttattcgtgaaaaccaaccataatgccgccttcttcggcgtagaaactacacaggccatgcatcggtcgaatcgttatttgcgcatcaggatattcggctaaaatcttttccttaattgtggcagcgtctttttcattttcgcagtgatcaataattacttcgccgccgtgataattatcttccttcatgtacttgataatttcacggattgcctttttcattccgcgcgccttagtcagcggttcaagtttaccttctttgctagctgtcccaatcaaattgatcttgagcaaacctgcgattttggctacagctggtgaaacacgaccgtttaaagataaattatgtagtgattgcaaaacaaaaagcaaatgagtctgcattctaaacttagcaattgcttcttctagatctacaaagcgcatttcaccttgcagcattttctcaataccatggactatgattgctagctcaggtcccgcacttcttgaatcaactactataattttactcaagggatgtttttcctcatacattgcttttgcctgaagggctgaagaaaaagtgccactcatcccgctggtcattgtgacgataatcgctttttctgttccttcaagtgcgtcaagccatgcttgaatacttggacaagttgtttggcctgccacattattttggttcatattggacaaaaattccttcatattcaaatcttgattatcaaggtaatccttaccaccaaaagaaattgtcagaggcactacttccaaattacgcgccggatcattattcatattggcacttgagtcaacaattaatttaatattttccattttagattccttattttttgtatttattttaatacatatattatagtcctttgatatagagttttttaggctgctttactaatttttaaaatgtaaaccgctttcatatgtttacaccgtcacaaagttaggctaaaatttgagatgtaaagcggagcaaaaattgttccgtatggtatgaaaaacataccataatttttgaggaggtttattaatgctcaaatcagttattgaaaatgtacacgcacttgaaattttcgactcacgtggtaacccaactgttgaagttcacgttactctttcaaacggtgtcgtaggtaaggctgaagttccatcaggtgcttcaactggtgaaaacgaagctgttgaattacgtgacggtggttcacgtcttggtggtaagggtgtttcaaaggctgttaacaacgttaacactgaaattaacgatgctcttaagggtatggacccatacaaccaaccaaagattgacaagaccatgattgacttagacggtactccaaacaagggtcgtcttggtgccaacgctatcttaggtgtatctatggctgttgcagttgcagctgctaacgatgctcaccttccattgtacagataccttggcggtactgatcttgaaatgccacaaactttccacaacgttatcaacggtggtgaacacgctgacaacggtatcgacattcaagaattcatgatcactccagttgctaagacttcattccgtgacggtttcgaaaagatcgttaacgtataccacaccttgaagaaggttcttgaagacatgggttacgaaactggtttaggtgacgaaggtggtttcgctcctaacatgaagaactcagaagaagctttgaaggctcttcacgaatcaatcatcaaggctggttacaagccaggtgaagatatcgctattgcatgtgactgtgctgcttcatacttctacaacaaggatgatcacaagtaccaccttgaaggtaaggttcttactgatgaagaattagcagattactacgacaagcttttggacgaattcccagaattaatttctatggaagacccatacgacgaaaacgatgttgaaggtatggttaagttcactaagagccacaaggaccgtatccaaatcgttcttgacgacttcatttgtactaaccctgcacttttgactaaggctatcaaggaaggtgctggtaacgcttcacttatcaagttgaaccaaatcggtactgttactgaaacccttgaaactatccgtctttcacgtaagaacggctacaacactatgatttctcaccgttcaggtgaaactggtgataccttcatcgctgacttagctgttgctgttaacggtggtcaacttaagaccggtgctccagctcgttcagaacgtgttgaaaagtacaaccgcttacttgaaatcgaagaagaacttggcgatggtgaacgtcttgccttcttcccagacgatgttgatcacgattaatttcgagttaaccgagtacaatttcaaaaaaagcatgagaattaattttctcatgcttttttgcttactcatttaatctttattttactaattgactaaagattttattcagagatgtatctttaactactttaactacaattgggttgccattcctagactgatcaagcaagataaccggcttatcagatttaaggcagaataagtaagtattgtgccaagatttaaagtcatcattagcaattgccagcacattataatcatattttgccttgcccgttggactgtagcctatcttaattgactttttattcaaaacaaaccgattagttgctagcactccaggataagttgcaccctttttggtctttaaattctttttcccatcataaaactgataggtctgaccggactttttaccccagttattgactgcagtctttaacttggctgtcttagctgtattccaaattacaacagccgactttttagtcctatttttcttattctctttgattttctttttcgagtcttttttaggcttaatcttcttggaacttgaagattgtaccttggcagatttagccttttttacgtttactgttttcttattttgttttacttcaccaatcgtcactgcatctttaccaaaatgtacttgactacaacccgtcaaagtcacagctaaagtgactgcagcaatacctacaaaaatttttctattcataaatagctccatttgttatttcttatgtctattatcacacaaaacctccctctttaaccgctgtttaaataaaaaaagagctaattttcatatcaatgtcattaagttaagacattgacaaattatcgacttggacttttaagatcattcatttgcgatttatcgcatttgaatgctcttttttcatgccaaataaacctaaatcttgtttagaaattaggctacacgatataaataatatacagctgatttgggtttgagatttcttttgtcttttcgtcctggtctgatcggaattgtgtaatgactaatttgaataagaatctttttaaagatttcagttgaagaagaaattatatacatagcctggatgacaaaacatgactgtttgaaattgatcgcatattgatacttgcattttttttgtggtacatatgcttgagcatcaatttgactgactgcgttaaacataatcatgtgggcatagatctccatttcaataaatctatcctgcttggaatgaaactgtacgctacctaaagcatatttcaactttttgaatgaagtttcaatgccccagcgcaaatggtagatttctttgatcctttttaagggataatcggctctatttagattagttagaacaacttcccattcttctttgcctgatttaggatcattaattctaaatttacaggcacgaaattttattgtacataactctccaaagtcccagctgccatctttggtatttttagaccgatattttatatattgacggtaatgatggttaaccaaatgaacgttttctgtagccttatgggtttcataataataattagaggtagtcacccagcaagctatatccttatcacactcttgattaggcaactcagctacttccttaaatgcgccatatcccgttttagtacgtatgacataataacagttaggcaggcgattacaattttcaatcatgttaaagccggtataacctcgatccatagtaactatatatggtccgcaatttagctttttaagcatttgaacggcggctttacgttcatccatctttgacttaggctgaaagatgcagtcttgataagtattatttaacaggtcatagagtgcattaacatgaatttggcaatatggctttcctttatgattgagatttccaacgatattctctgatttaggattccagatttgattaaaatcagacccatcaatggcaaatatacgatatttatgatcaaataactggatattaaataaattctgattaaatacagttagaatatgcttaaaacatgcgggtgaaagctgacctttgcgttggacataagcggaagtactgaccactttatcgttatttttaatagctttttggccaaaagctctaaacaactcactggtcaaatcttttccttgcatattaatagtagttttaatgactgtagctgcatctaaaaaccgcttcctagtgaaggcatgaggatcatcgataaaatcatgaatatgctttccagtatcattgataatttgatcaagacgatctaaaatatttctgtgaagggctttcataattaacaccagctttctggcaataattttgaaggtttaataatttaatcagagggcgaaaaggtaggttcttttcgcctttattttatgcaaaaaaagaaccaaatcataatgattcggttctacagagattagattcaatttgtcaatgtcttaacttaatgacattgattttcatattagctctttttaattaataaattgtaacttgataacgatttgaacgatccgttgcttccggtttttctccaatcttgccaaccggcacgatgacactcgtctgaaaggcaggatcaatccccagctccttctgcaattcgctgtcatcatttaatctagctgcaccgcccattacataaactgagccaagacctaagtctgtcgcctcaagcataatgttctctgcaccacaggatgcatcgcgctcgccaaacatgctgtcttttttagtattaattataaataatactggggcatgataacacgcattatcggtcttcgtctcaatcttgtcgcgcaatgcttcatctttaacaaccaccaagctcattacatctgtctgatgcattccacaaggagtcgtttgaaaagcagcaattagactcttaatctcatcgtctgaaatagattcactgctaaagtttctaacagctctccgatttgtaaaaattgaattaaccatatatgcctccgtttttactttacatgcctattttagcattcaagattttattgacaacgttttcatgaataattatgatggtggtaaaaagtatagatttttatgaggtgaatacataatgaatttagcagcaattgatattggtggtacaacgattaaactcgcaacttggaaagatggcaaattacaaaataaccatgcagttgatactcctaaggatttaaatggcttttatgatgttttaacagcagaaattaataaaatcaaacaagatactaaaatcgaaggagtagccatctcctcacccggtgccgttgatcaaaagactggaatcattggtggctcatctgccttgccttacatccataattttaagattgttgacgaattagaaaaaagatttgaattacctgtatctatcgaaaatgatgctaactctgctgccttaggtgaattagctgctggtgctggaaaaggttgcaattcaatggtcttttttgttatcggtaccggaattggtggagccttaattattaatcaaaaagtttggcatggggctcatctttttggcggtgaatttggctacatgctaatgggaacacatactttaagcgaacttgcttctccggttacaatggctaaccattataatgaaagaaccggtaaaaatcttgatggtaaaaccgtttttgccttagctgatcaagatgatcccgttgcaagcgatgtccgctctactctaattcattccctggcagttgccatctacaatattcaacacagctttgatcctgaaaaaatagttctaggtgggggcatttctaacaaccctgagttaattcctctcctaaacaaagaaattgatcaaattgaagcaaattcagacttacataccttaaagcctgtcattgccctctgttcactaaaaagcgatgccaacttgcgtggagcagttgctaatttcgagcaaaagcatcaaaattaatcaaactataattgttattttatctaaaataatctttctacaagcctatataaatgggcttttttctttatgtaaattaaaagtatagatttttaactaattagatctttattttcattattaatctgatatacttatttatgtagataaatgaaagtgcttacagagggagaggagaaatagatgtctgaaaagcgcaaattgccatccacctttttctggggcaactcagtttcaagtatgcaaactgaaggtgcttggaatgaagatggcaaaggtctctccgtttatgatgttcgccctgctactgacaaaacaactgattggcatgtagcaattgatgaatatcatagatacgatgaagacctcgacttaatgaaagatatgcacctgaacatgtatcgaattcaaatttcatggtcacgtgtatgtcctgatggcgacggcgacttcaacgaaaaaggtatcgacttttatgatcgtttaatcaatgcgatgcttaaacgtggcattgaaccaatgatttgtctttaccatttcgacatgccactgaatttagctaagaaatacaatggctttatgtcacggcatgtagttgacgcgttcgttcgctttggtaaaaagatgattgatcacttcggtgaccgggtaaagtattggatcgttttcaatgaacataacctttacttccaagatgaagttttcaatatttcaggttatgaacatggtgaaaagagcttagatgatatgtacaccatcttccaccatacgatgatgtgtcacattcaattagctaattacatccacgaaaattattctgatgtaaaaattggcggtatgcttgcctaccaacaaatttatccagctaccagcaaacctaaagatatttggtctgccaaacaagttcaagaatttttaaacttcaatatttatgatgctgatactggtcgtggttactcaccagaagtaatgcaatatgccaagaaccatcacatcaacatggatatcactgatgaagacaaagaaattatgaaaaaagctaaagctgacttccttgccttttcatattactcatcatgggtattatcaagtgacaaaattcctgccggtgaggctcctaaccgctaccttaaccaaggcggcgtagaagccaaatacgtaaaaactaacgattggggctgggcaatcgatccacttggcttcagaaatgcaatcactaccatgtataactactaccgtattcctattttccctattgaaaatggtattggtcttaaagaaacatgggatggcaagaatatgatcgaagatgatgagagaattgcatatcatcgcgatcacattaaagccatgaaggatgccatttttgatgatggtgctaaggttcttggctatctcggctggggcttaatcgatattccaagttctcatgctgatatggaaaagcgctacggtgctatttacgtcaacagatcaaatcatgacttaaaagacttaaaacgtgtacctaagaaatcattttactggttccaaaaggtacttagtgataatggagatgaattataatggctgatcaaaaacaatctggatttggcttatgggttaaccaacacataatgccaccaatcatgaaattcgttaacactaaagcaattaccgctctgcaaaatggtatggtttactcactgccattcattattatcggttctattttcctgattttaggaaatattcctattaagtccgttgcagatgcaattaatgcttctggttggggtgctatttttgcacaagccaacaacaccactttccaaatgatgggtttgtgggctgctattggtattgcttatgtttatgttaaaaacgaaaattacgaacctttagcaccaggtcttacttcagcagctgctttcttaatgctacaaaacttaagcattgataatccattaaaggctgctttaacttcaggtcttactgatggttcaatgacaggtaaagtagtaacagaaaacattgataaattgcctcatgctttacaatcattcttagaatcacctgttactggtgtaattaacactaagtggcttggtggtgacggtatgatcgctgcaattatcgttggtttacttgttggttggatctacacaatgattatgaaggcaggttggactattaagatgccagctcaagttccacctgcagtatctaaccaatttactgctatgattccttcaggtgttatccttacaggttcaatgttgatttatgctgcatttaatgcatttgcacacactgacttcttaaactggatctacaatactttacaaattcctcttcaaggtatttcagactcattcggtggtgctatcgctattggattccttgtaccattcttctggttcttcggtgtccacggtggtttgatcatgggatcacttgttgctccaatgcttcaagccaacactgctgacaacgctagattattcgctgaaggcaaacttactattgctcaaggtgctcacgttgttactaatgaattctacaacaacttcattaacttaactggttctggtattactattggtttaattatcttcactttagttgctgctaaatcagttcaattgaagtcaattggtaagttagaattagtacctggtatcttcaacattaacgaaccattcctcttcggtttgccaatcgttatgaacccaatgcttgctgtacctttcttcttaactccattagtagttgctgcttcaacttacttggttatcaaaactggtattgttccaccacttaatggtgttgccgctccatggactacaccagctgttatctctggtttcttaattggtggctggaagatggccatctggcaggcatgtacgttacttatttcaacagctatttactggccatttgctagaaaatacgataaggtattgctcgctaaagaaatgaaagaagctaaacaagaagcaaataagtaaaaatatgctaatcatatgaaattaaatatagttttagaaagagagatgccattaatgcttgtaaaatagtaaaaatgacgtctcttttttgataaagtatagacttttgttttaaaatagaagtataaaagtaaagaagatgaaaaaacatggcaaaggcaaaatatttagaggtcgcaagtgaattaaaaaaacgtattgaaaatggtgtttacagtaagcaagagcccttacctgatcaagaggcattcgctaaagaatttgacgttagtcgtctgactgtaaaaaaggctttcgatggtttggagcgacaaggactagtttataaacaatctggcttaggaacatttgtcgcaggcgaagttccaattaaatctgatattgattctcccgtcaatgcttttactggtttaagaaacttactaggaaaaaacgaagttacaagtaaggtgctacacttctctgttgagtttcccgatgagcaaatacaaaagaacctcgatctaaagcgaaatgaaccagtctataacattgttcgacttagaatctatgatgatcaaccctacattattgagcatacttatatgccaattaagctggttcccgaattagatgagaagattctacatgcatcaatctataattacatccatcaaaaattgcatttaaagtttggtcatgcttatcgaaaaattcgtgctgctaaacccaacgaatacgataaaaaattcttagatgctaaagatgatgacccaatgcttgagctagaacagatcatttggcttacaaatgggcaaccaatcgaatattcaaccagtagaaatcgatacgatactcgcgattacgttttattagataataaccgattttaggaggtattttatggcattctcaaaaaatttcacttggggtggcgctactgctgctaaccaatatgaaggtggctatgatgaaggtggcaaaggtttaaatgctgttgacgttttaactaatggctcagcaactgaaccgcgtaaggtaacttggaaaaagcctaatggtgaaactggagctacgcctctagtttgggggcaagaatttagtctacctgaaggtgctgttccaactattttagacggttactactaccccagccaccaaggaacggacttttatcaccactatcaagaagatattaaattaatggccgacatgggctttgatgttttcaggctatcaatgaactggtccagaattttgccaaatggtgatgacgaacaacctaatgaagacggattagccttttacaataaagtatttgatgaatgtgctaagtatggcattgaaccactggtaactttatcccactatgagacacctctttctttaattacccactacggtggctggaaagatcgccatttaatcgatgctttcgttcactactctgatatcgtgatgaagcactacaaaggcaaagttagatattggcttacttttaacgaaatcaacgccatggacatggctccttatatgggtggcggtttaatcgatggtagcgaacaaaatcgtgctcaaggtgctcacaatcaattcgtagctagcgctaaggtagttaaattagcccatgaaattgaccccaacaaccgtgttggccaaatgctagcttattctgcctactacccttacacttgtgatcctgctgatcaacttaaagtgatggaagccaagcaagagatgctcttctacagtgatgttcaaactggcggccgctaccctaactatcgtcttaagaaatatgaacgtgatgggattaagcttaatgatacaccagaagattatgaattaatcgctaaatatccagcagatttcttaagtttttcttgctatacttcaaacgttttaaccactcatgaagctgatgctaaagctaacggtaatgtttctgctggtggtgtagttaacccatatcttgagagtaatgcttggggctgggcaactgatccagatgttttacgaatcggcctaaatgagctctgggatcgttaccacaagcctctatgggtagtagaaaatggtttaggttctgctgacacccttgaaaaagatggatcaattcatgataactatcgtattgattacttacgagaccagatcaaatcaatgcgggatgctgtcacaattgatggtgtcgatttgatgggatacactacctggtcagcaatcgatcttgtctcaaatgggactggtgagatgaagaaacgctatggttttgtctatattgatcgtgatgaccgtggcaatggctcactcaagcgttatcctaaagattcattctactggtataaaaaagttatcacctcaaatggtgaggatttagactaaaacttttatttataaatagagcctagctaaaaagtgctagactctatttttctaaaaagatatgatgaaagcataagtaatatagatgagagaaggaaaagtatgattacaattactaaacaattcaacttcaaggctaaggacttctttgattaccttgaagaacaattaattcctgctattaaaaaagctcgtggtaatgacatgccggtaacgcttgctaaaggtactaaatacgaggtggatggtgcccaagtagaattaaccgattacgaaagaaacaaggtctatggggctcattttaagacagatcgaatggaattagtgattaaatatgtcactgaggataacgatcaaggcgtaaaaatcaccttttctgaagacatgcttagctttgaccgcgagaaacacggcaaactccaaactatgttttacaatttccaattaaagatgggcgcaaagaaagaattaagacgaatgggtgacaatgttttagctaatattgcagcttaaaatcgccatctcagcagcaaaaagaccataactacttctaattgtgttgtagttatggtcttttttttgttcaaattaacaatcttatctatatcaaaattaatctattagttcttagtagcgtcagcctgttccttcttcaataagacattgtcatagtgcttgatgaatgggaaccaaactaagaaagcaacaagtgcacaaataattgaaagcacggcaccttgccagctagtagttgcaagataaccactcaaacccactggagttggccatggttgttgcacaataatcttaggtactaaatgtgaagttactgcgatgtaacccaccaagccagaagcaagtggagcacaaatgaatggcacaagcaagttaatgttataaacgattggcaaaccgaataacaatggttcattaatattaaaaatggcaggaaccaattcaaccttaccaatttctttcaattgagctgaacgagaaccaaaggctaaccagattgccatccctaaagtagcacctgaaccaccaataattacaaaggagttcatcggatcacctgcaaagaagtgattagcaccatttacattagcagccatattagctaaaacaattggagtatagaatgagctcatgatagtagcaccatgaattccgaaccaccataagaagtgaatcaagaaaatgataatcaaaaagccccaccaagtatcagcaattgcactgatgaatgagaatggaatgtaaagaacttggaaaatatcagttcctaaagttaccaaaattagttcaatcaatgcaactacaacagcaatacaaaagcctgggatcaaagcgctaaatgagttagaaacaccagatggaactgatgcaggcatttttattctccagttgtgcttaacagtgtaacggtagatctgaactgtaagccatgcaattactaatccagtgaagataccaacggcagcaattctggtaataccatttgttgaggcttcataaccgcctgccaccattttagtcttagtaaatgtagtaataaattgaacagcaccatttttccaaataagttccggaacagtaatgaagaatgccattaagaacatcatcaaaccgttcatcggtaccaaatcaattttctcttctcttcgataaatatccgtgtatgaataagcaaaagtacctgcaaatactaatgccaagatacccatagtcgagttgtaaactacttggaataagccactaaagcggcctaaagtattcgcataaaatgcggcaaatcctggaattggaaatgcttgaggcagcacattcaaaattaagaaaactgccccgataattgaaaatgaaataacgctataaccagcgtccataatagctctaacaaaacgtgaacctgcaaatttacctgcttttgcagctagcgcatctttaaaagagccagattttgaatcagccatatttctttcccccaatattctgaaacatcattaaatctgaacaaccttattatagcgaaagcgttttctaatgtaaacgtttttattgatatacgatatattttggttttttaaaatgtatatttttgaaattacttctaataaaaaaagttcatgtaactttacatgaactattgttggtgcttcttaaaagtctctatcaccttgtgataacgatcttgatcattcataatttgatgaattcggtattcgctccaaacacacaataaaatgccagctaaaaacaaagttgtcataaagaacataatactttgattttcgatgaatgggaataaatacttacccaatggcaaaaacgtcaatattataaaaagcaaatttaaagctgcttgtacttcaagataaactctgctaattgggacctctcgttttcgattatgcattttagttaactgctcaatcgaagcaatcccactataaattgtcataattgccgaaacaataatgccaagaacactatgataatttacatcaataattagccacatcaagttggtaaaaaagaagatagtaataatatatctaattaacttaaacttcccacactaaataagccagtaatctcttgatcttgcttggctttaggcttctatattatttttgctagttttctttaacaatttttgcatgtatttgggtaaacgattgataaagtcagccgtgaattcagctatttgtgcttcactggcatgaaagacttgctttacgctggccagcattgcatcagtaatcaattgcaaggaatggctaaaagtaatgtccgccagctcatcaatcatgcaatagaacagctcgcctagcgtgcgttcatcttcatcgtcccgcttggcaactgacataagcatgtagcgagtaaaaactatggcaacatgagcggtcaaagcatcgtaagacaggccatgatattccgtacttagttttagataacttttgcaagttttgaaaaaaacctcaatatcccaacgcttgccgtagttgcggataatttcatcttcgctaagcgacatgtcggtacaaatgattgccagccaatccttgcgattggcacgatttctaacgcagacaatccgtgcatctattttagcaccgtctttgtcctggcgtccgactttgactgggattgacagcaggtagcgagaacggccgcatcgctttttacagctgcgataaatctgtttgatgtttttgcgttctccctcaaattcatatttgattttggagctaaccttaaccatggcaatcacatccagcttcctttgcttgagctggacgatttgatgtggatttgagaaccagctgtcaaacagtacgtacttggcttgatgacctgctttcatagcttggtcgattaaattaaccatcacgtctgtgcctttagtccgggcaagcatacgtctttggccagcaatggtgcgctgatcaaaaactttattttcgccaatcatattctgtagcttctgagaagacagcagcactgaattgattggcatgaaagaagctccatcagtccagcccagggtcatcatgcgaaaacctttcttgtaagtcattgatacatggtcaaaaactttggcgactaattctgttttcttgaagccggtcctagagaagtaggaatcatcgacaacaaagcaatcagcccgtttttctgaagtcaaagatcgcaagtggttattaatgatttgcgcagacagaagtgtggtgaagtggagccaattgacgtgaacgttgcgcataaaacggtaatatgagttcttggaaaaattttcttgaaaatgatccattttcagctgcatatataagctgcggtcacgaaagacattgcttaaaacgtaaagaaacaagctgaacaggctaatgcctttttccttgcggaagccacattttctcaacagcttgatcacctgaaacttcttgatgaagctgatgattgagtttgaaaatagttgttcattttgttggtcaggagatggtaaaatagacattggcacaagcctttcatgcaaataaattatgttttggtcaatataattatagcaatgaaaaggacttgtgccttttatatttgtcaaaacacgcagaatcacaatgaaacaagcaattttgcgtgtgggaagtttaagtaattaacaaatatcgactaaaatacatatacttaatgctatcttcatgtcttttcttagccgtctctgtctgttcttttttaatgttttgtttattcatttttcttcgtctcatttcttgcctaataattatatttaagcacaaatcaggcaaaaattatcgaaaaaaataactcccgcattcgcaggagttattttcattttcagcgattacttatcttcttttttaagagagccagattcatacagcttttcgtaaagatcaaccatttctccagctaaatctctaaaagtgatagcattcatcaagtgatcttgagagtgaactaccaacaaagttacatgcatgtggtcgccttgagcttctttagttaacatgccggtttgtgaattgtgagcttcaagaagtgatttgtcactttccttcaacttttcacgagcacctgcaatatcgccttttttagccaagcgaattgcttcaaaggctaaactctttgcattaccaccattggcaattaaacccatagcagccattaaagtttcttgttctttttgttctggagttttcttttcttctgccataaaatctgtctcactttccttagctattttagctaattaattattcacctttgatcaatttttcagcttgtgccaaaacgttagcaccattcatcatgccgtaatcttgcatattaattacgtctaaaggaatgtccttaccgtctttacccttacctttaaccttgttttcgaagtcacccttcatgtaacttacttgaggcccaagaagtacacaatcgatttcttgttgtgccatcttgtcatcagcttctgatgctgggcaagcaaagatttctgcatcaataccttgttccttagcagcagcttgcatcttagttactaagagtgaagtactcataccagcactacaatttaacatgatagtttgttcagccataataaatttcctcctgaaatttttattttatagtttaattagcttttattgatctacaccaattattataaaacgctttcattgatttgtaaacaaaaaattatacatgcacggcttagtcttaccatgcttatataatcatctcaagcaaaagatatatacttttatctcctgacagccaatattatatatcctttgtaagcattttcaaatacatatcctcagcatgttaagcaaagtcctttgcatacgtatgctttaacataaaaaataaattattttttagcaaacgctttcaattaataaatgaatactgttagaatgtatatgtaatttattcctttacaatagaaaggaggcagaatcttgagtcgctatcaagacattgccaatgatatagaaaaagatattattgagaaaaaatatacaagaaaactacctgaacaatttgaactggcccaaaaatatcaaactagtcgggtcacaatcgttcacgccttaaagattttacaaaataaaaaattaatacggactgtcaagggacatgggacctttattacaagcaagtctattcccgacatttttcttaattctgatgtcaatgagcataccggctttactcgtcacgtcaataatgctctcgcaataaccagtaatgtgattgcctttaacattcgcaaacctagtattagtgaacgaaaagctctttgtttagaaaaagatgacgaagtttacgatattattagacaacgaattttaaataaaaagccagctaaattagaatataccgtgatgccagttagccgcatccccggtatcaccctagatattttgcacaagtcaatctactcttatattcaaaatgatcttgggcttaagatcggccgagcagatcgcattattacagctgaaaaatctgatgcatatgatatgaagtatcttgaatgtaaaaatgatgatcctgttttatgtattcagcaaaaggcattccttgaagacggacgaccttttgaaatttctgagtcacgtaatcgctatgaccgtggtgatttaacagttaatggcaaataagtgttacttgattaaaaaaatcaattatggcaaaatggctctcgtaagcgtttccaattacatacaagaaagtgaggaaaaatttaatgtattcagcaaaaatgcctaaaaactttttatggggtggtgcagttgctgcccaccaacttgaaggtgcttggaaagaaggaggaaaaggtacttctgttgctgatgtaatgaccgttggttcagctactaaaccacgtgaaattactgacggtgttcttgaaggcaagaattatcctaatcactcagccattgatttttatcatcactacaaagaagacattaaattaatggctgaaatgggcttcaaggcttttagaacttcaattgcctggacaagaatctttcctaatggtgatgaagccgaacctaacgaggaaggtttaaagttctatgacgatttatttgatacttgtcatgaatacggcattgaacccgttattaccctctcccactttgaaatgccttttaatttagctaaaaactatggtggttttaccaaccgaaaagtaatcgatttcttcgttcgttttgcagaagtttgcttcaaacgctacaagaataaagttaagtactggatgacctttaacgaaattgataatcagtctgcattcaataatgatttcttgatggctactaactcaggcattttgttcaaagatggcatgactgacagtgataaagaagccgccatgtatcaagcaggtcactatgaattggttgcttcagccttagctgttaagattggtcacaagattaatcctgatttccaaatcggttgtatgattaactactcacctgtacgtccgctcactccatcaagtgatgatgtccttttagctgataaatgggagcaacgccgtgactggttctcagatgtacatgtttttggtgaatatccaaatgcagttgaatcctacattgaacgaaatggctatcgtcctgatataactgatgaagataaaattgtcctaaaggaaggcaccgttgactacgttggcttctcctactatcagactactaccgtttctagcgaaaaagttaaacctgatgaattaactgatttggctaaagctgttgctaagaatccaaccttaaagcgtagcgattgggactgggaaattgacccagaaggcttaagaattgcattaaatcaattgcaagaccgttatcacaaaccattattcatcgttgaaaatggtcttggagcttacgataaagttgaaactgatgggtcaattcacgatgactacagaattgactacttaagaaaccatatttcagaaatggaaaaggcagttgaactcgatggagttaacttaatgggctacttaccatggggctgtattgaccttgtttctgcaggtactggtcaaatggataagcgctacggctttatctacgttgataaaaacgatgctggtgaaggtacattggctcgttcacgtaaggactcattcttctggtacaagaaagttatcgaatctaacggtcaagacttagattaattaaactattaatagcaaaaaactgatattcagactttaatcattgaatatcagttttttattttataaatatttactgccttctttaatactcaatttagctaaatgctctcgatgcagttcaatgaagttacgcacccaatctggattggtcttagagtaatcacgcaaagcccagccaattgccttgttgataaaaaactcctgactatcaagattattttcaataattttttgtaataacgcggtgttcatcttctttttacgcaataattgatgctcaatcgcgacccttcttacccagaaatctggatcttgcgaccacttgagcattagatcgtctactcgattatccgttaagccaacatagccataaattttgattaatgagtcaatcgtatcccaccattgctttgttctaacaaaacgctcaattttagctaaatcatcaaaaacaatatactttttcattgccaataaataatcacaggcaaaatattgcaattcgcgttgttcttcatcccatgcctggtctagcaacttccagtcaacttcttttttcttcttttcatctttcaaaaaattatgataaatcgccctacgttctggtgtttgtaggccatagaatagaaattgattttgcatgtaaccaacaagatgattggccttttcttcatttgcccgagcgctaaattctttttttaatgtttcaatattcatgttttttattttagcacaaaaagaggtctccaaattctagagacgcttatcgtaaaaataatcatctacccgatcatttcaactaaaagcttggtagaataaaagtatctatattaagaaaggcataaacaatgaaacaaatttattttaaccatgatggtaatatcgatgatttagtatcttatctgctcttactacaagcaccagatatcaaacttttaggtgttggtgcaattgatgcagacggctacattgatcctagtgttgaagcatgtcgcaaaatgaccgatctttttaacttacgtggtgatgatttgactattgctcgttccaactcacgtgcagtcaaccaatttcctcacgagtggcggatggcaacttattcatttaattatcttcccatgctcaatgaaagtggcaagattaatacgcagaaggcaaaacttcctgctcatttagacatggtcgaaaaaattaaagaagcagacgagcctatcgttttagttatgacaggtccgttaactgacctggctcgcgctttagatgtcgatcccgacattgagaaaaacattgaaaaactttattggatgggtggttctcttgatgggcacggcaacgttgctatggttaacgctgacggtagtcaagaatggaactcgttttgggatccatacgcagttaaacgcgtatttgaatcaaatattccaattcagatggtgggattagaaagtacggaagaattaccacttaacgatgagttgcgtcagcactgggcaagtttacgtaaatatcctgcaatggacttgataggacaaggctatagtctaatcgtatctataccatcagccgaactctacctttgggatgtgctaactacaatcagcgcactatatccagaagttgttgaaaccgaaacggctaaagcaagagtcatcactgatgggttaagtgcaggaagctttgtacgggatcctaaaggaagagaagtaactcttgttactaaagccaataaggatctcttcttccaaaagatggatgaaattttagaaagaaaataacaaaaaagaggctcacgcctcttttttatattgccttaattgactttttgtaaagaattaccgcaatccaaactgaaatgaatgatggcagtatcgcaactacaaacaaatttggatctaaaaaattacctactctgatgaagtttgtaattgaagtaatatgttttatgttactaaatatcgcttgataaactgtaacatatattaacgaccactgaatataatattctaccaaagtgagtgtagttgtcgaaaacttaaaaattttgctagccagtcgcatcccccaataaacaaaaacacctgaaagtacaacaaatgctgctaacagcaaaaacaagtttcccaaattaacatggtcccattgactcatgatcaaatacgcaattaccatgaaaattaagaaattaattgttgaacaacacagctgaatgacaaataaaattgcagcctttaagaattcaaacttgtgctctgatctgaataacaaaaatactactagaataattacagcaatgatgaaatatgtagtaacgtgcacagttatctcctactttgcctgttttaaggcttcgcttgtagcctctttaaccccattggaagtaaatgttgcaccagtaacagcgtcgatatcagcagattgtttatccaaaatttcctgctttaatgttttttctgctttttgaccatactgcggcgtttccgtagataaatctaaatctacagttgaaattttattatcagctacagttaatgtcacacctacaaagcctgccatgccgcgtgcacgggcactatatgttccttcttttaacatcctttttcctcttttttataaaacaaaaatactgctatataataaatataacagtattcctaaaaaaagccacaaagatattgtgtttagtatatcatattgatatactatttcttgggtcttgattgtttttataagtccttattatgacccatgtgcaggtagtagaatccccttctacctgttttattataccacaataaataactgatgttatatcaaatcctaagttcttttgaaaattttctcaaaagggcttttttcttgcactatcctttataagttacgttaaaattgaaatggaattataaagttatatttaaagaaggtaaagcatgtatccagataataatattcttacatatttaaaatggcgtggtgacgttgacttctcaacatcgccttttaatgatattgatgcacttgttttatctattttttcttatcttgaattaccaggtattgttaaaagtaacggaacgacaattagtttagaaaaggctgccaagctctattttgcagatgatcatcctcgttatgataatttgcaataccaagaactatttaaattaatggctcatgcagaccgctttaaaaatgcaaaactgtcgtattttattagtacgttaactgaacatactcaatttagtgcaatcaaaattgaactaactgatgggaccaactttattgcttttcgtgggactgacgattcactaattggctggaaagaagattttgaaattagttttaaaatcactgtagcccaacaacaagcagtaaaattgctcgaaactattctcaaagctgatgatcaagattattacttaggcggtcactcaaaaggtggcaatttagctgaatatgctgccattaatattgagcccaaattaagaaaaagaatcaaacgtatttatacctttgattcacctggaattgcagaagaaattggtgctcagctccctaataagtatttgcaaaatactctacgccgctttgtgccagactttagcgtcatcggtcgcttatttgagtcgaaaaatattccagccactattgttgatagtactcgcaagggactaagccaacacgatgctttttcctggcaaataatcggttctaacttcgacaccagacgccaccgcaatgctcaatctcaagtatataatcaactaatcaatcaatggattggtaacgccaccctagaagaacgtgagtctttaactaatgacctcttctctgctttaagctctagcggcgcaactaagatcaacgaacttgataaaaatggttttggcggttttggtgcaattttgttttcactggctgattcatctcggcgaacccgtttcgtctttggttcattattttccagcatttggcagacgatcaagagccagcaactgaccaaagcgcttttctcaacagacacaattgttggttgggtgctggtagtattaggaatcattagtctaactctaccccaatatgcagtgcgcgcttttggcgccctagttgccttcacggggattggtttcagtgttcaccaaattttaacaacggcaaaatctagtctaaaagaccgacaaaaaaacttctttattatttcgtatttagtagtttttgctttatcaaccgcgttaatttctaataaccgtctactaattttcttagctcactacttcttaggactattcttaattatctattcctacattcgaattaggcaactagtctttcgtaaattacccggaatttttcagattactattgtagcgatcgaggcattaattgcttttgctttaggaattattgtagtggttaaccctagtgcctttaatcggagagcaattattattatcggtattttgctaattgcttacggcttcttcaagttagttggcgaattatttggccagcgcagcaaaatgcccaaaaatcatcgttaaaaaaagcttgttaacttcaatatcagttaacaagcttttttcttagcccttaataaaggtattagcctttatatgctttaaaatgttatacccgattgcacgaatatgatttttactaccataagtttgattcaaaaacattacaattccattctgattatcagtagtcagttgcatccagttaacaaagtgggtatcaccaaaattgccataagcgacttttaaagtttgattctttttcagataaaaaccacctgagtaagtattaaccttagaacttaaatgaccaagataatggaactgttttttagtcagaatcttgccattttgcataccagattggattttataataatcattagccgttgaaaatagattcccagcaccaggcaattgagaaacaacattacgattagcataggcactagcactgtaatttttaccaccagaataaagatatgaaatcgcatcagtctttgaccgcggaatttgttgataaatataggtttgcttcaacttcaatgatcgaataacccgctgtttcacattagcagcataagactttcccgttactttactgataatgcctgccagcaaaacatagttagcattattgtaattaaatttactgcgtcccgtattttctcgtgcattggcttgggcaattgtccaattgatcgcgccattttcagaaaaattaactccatgattagattctgttccaattacgttaattcctgaggtatgtgtcattaactgccccaccgtaatttggtttgcatgcttcaaatttggataccagcgtgaaatcttagtattctgattgaatttcttctggtagattaactgtgtaattattgcagcagtaaccatcttttgcaaagaaccaactggataaagcaattttgtattgccattttcagtcgtttgctgtaataaccgtagcctaagctaacacgttgagcatgcccattttttacaatttcaatgcttcctcgtaaatgatgctttttcatcatcttaagcgtatattgccgtagttgcttatttgaataactcttcgcctgcacagcatgatttgacattatcaaacacgatgaacaaaataaaatgaaagctatcccgaacttttttagtgtcttcaaaatttcaatctccttttaatcctgaactattctaccacaatcaaaaagcgcaaaatcacttttaatcatggtttgcgctttcatttttattttttaaaatttttatagtaagttcatcttaactaggtattccgcattttcaaccgtattccatgcagcacccttaagcaaattatcggctacaatccacatgttgaaggcacccttattttcataatcagggcgaatgcggccaacaaaagtttctcgcttacctgttgcattaattggttgcggataaatttgatgtttaatatcatcttccaaaacattacctggaaaggcagcaactgcatctttaatatcttgtgccgttgcagtctcatcttcaagagtaaagtagacactttccccatgagaaattggcacaggaaccctaacacaagttgcagttaccttgatatctttggcattcatgtcatttagcatgatcttctttgtttcatgaatcatcttccattcttcatgagaatagccactatcttctaaaacatcaatttgaggtaacaaattaaaggctaatgggtaatgctttttgtctcctttagtaggtaaaatatgagcgtctgcttgcatgtctttaccatcaaggtagtcttgactttccttttttaattcatcaattgctgcttgtcctgctcctgaagcagcttgataagtggaaacgataatttgtttcaaaccaaattttcttcgaactggttccaaagccattaccatttgaattgttgaacaatttggattggcaatgatgccgtgatgctttttcaatgcttctggattaacttcaggtacaaccagtggtacatctggttccattctaaatgctgatgtattatcaacacagacagcaccacgcttaacggcttccggcagaaacttctttgacactgcaccaccagctgaggaaagtactaaatctacaccatcaaatgattctggtgtagtttcttcaactttcaaatcttgatccttaaattttaaaactgtacctgctgaacgtgaggatgcgagtagctttaagcttttaactggaatcgttgattgttccaattgttcgatcattcttcttcccacggcaccagtagcacctagaattgcaacattatattctttcaccattatttttctcctcgcaaaaaattcttcattctttccatcgcttcatgtagattttcatcactggaagcatatgacattctaacgtacccttctccaccaggaccaaaagcactacctggagtaataccgacttttgcttcaaatgctaaatccagtgcaaattgcatatcatttttaccatatttagctggaatcttagcgaaaatataaaatgctccctgtggtttaactgcttgcatccccatcttagctaattcatccaacacaaaatcgcgccttctttgatatattttgcggtatttttctggatcatccaatccatgctccaaagcttcagtcgctgcagcttgagaagagtcagttgtagtcgtaaccattaaaccatggactttaccaatttgttccataatttttgccggaccagctacataacccagtcggtatcctgtcattgcatgtgacttagataatccagaaatataaattgcccgttcaggaatcacacttgcaattgaaaaatgcttaacgccataagttaaagtactgtaaatttcatcagtaattacgtacagattgtgtgcttttatcacttcagctaatgccctaatttcgctttcggtgtattcaactcctgtcggattaactgggtagtttaagataaccgccttgatattagattcttccttaagtgtactttctaatctttctggcgttaatttaaagttatcttctgacgtgttcattaatacataatctgcatctgctaaagttgcaactggccaatatagtgaaaataccggtgtaggaatagcaaccttatcaccccgattggtaattgaaaatagtgtcgcattaattgcttcagttgcgccaactgtaaccacaatttcagtttctggatcgtaaactactccagttgcttttttcaaataattgctaattgcttgcctaagttccaattttcccttttgtggcgcatagtgtgaatcattatttcgaatactttcaattgcagctgttttaacatgctcaggtgtattcatatcaggctcacccaaagtcagcttgataattccaggaatggttgaaactttattatcaaaaatcctaatccccgaagccttaacagattgaatcttcttacttaaagctaagtcatttgctaattctggcataatttttcctcttataaaatattctctaagccaataactagttcagttaattgatctactttttctaaagcaactttaaccccactcataaaggaatcacgatcaaatgaatcctgtctaatggttaaagcttcgccaggtccaccaaataaaacttgctcatgtgcaatatagccaggtaagcgtactgaatggattttaattccttgataatctccaccgcgaacattggctaaagtctcagtttcatcaggcgcagtttgatgttcaggacgattttgcgcgatcatttttgcagtagctaaagcagtgcctgaaggtgcatcttttttatctgcatgatgcatttcaataatttcaacatcagggaaatacttagcagcttcttcagcaaacttcattaataaaactgccgacattccaaaattaggtgcgattaagccacctaatttttcctttttggctagttcaatcaaagttgcttcttgatcatcactcaagccagtagttcccacaataggtttaatttgatgcgttaaagcaaaataaacattgtcatagacagctgcgggagtagtaaaatcaatccaaatatctgcagcatggtcaggaatttgacttaattggttaaaaatttgggctgttttaggtaaatgatatctttcaggctcatttactgcctttggagcaaatccagccaccaattcaaaattgggcagctgattaactaaactaacagccttttgccccattgcgccagtaaacccagctattagtacttttttaggcatctcgtcttaccaatcctttcctaaattaagtggcaacttttgcatcaatgcattagcatttaaacctaaatgctgggccaacttttctttttcctcatcacctaaagcgactaatggcaaacgacatccccctactataaatccttgagcattcaaggctgccttaacaggagctggtgaaggatacataaacaaagcctgcattttcggcgttaaccagcgttgaatcgtgcccgcttcaggataatttccttcataaagatcatcaaacattcgccgcatttgtttgcaatataaatggctagctacggaaataacgccattggctcctagtaatcttgcaggtaacgcttgcgtatcttcaccactaaataccaaaaaattaggatctttatgatcaataatgtattccatttcttctaaagatgcacattgtttgattcccttaatatttttaaggcgtgataattggactaccgtttctttttccatttttacgccagttctaccgggaatgttataaatcataattggcattttagtctgagcattaacagcactaaaatgtgcaatcatgctacgctgatcaggcttattgtacggtggcactactactaaggcataatcaattcctttaatctgtgctacctcattggtgaaggcgatagtggttgcagtgtcgttactgcccgttcctgcaataaccggaacacgtccattaacaatttgaccaaaatgctggtacaagtctatcttttcatcatgagtcagagttggcgtttctccggtcgtaccaccaactacaaagccattgcaaccttggtcaattaaataattaaccagcttttctaaactggcaaaatctattttttgattctcatcaaatggcgtaacaatcgccgttaacaaatctgcatcaattaatgttgccattttattgcctcattctattaatcaaaaatcctttgattgcatcaacgccgcgctgaatgcttttctcatcaggattaagtgtagccgtatgcaattgtgaatcaggattaccaacacctagccaaaacattgttccagggaatttagccagcaaaaagccaaaatcttcacccgtcatttttggttcagtagtaataaagttaaccgtcggctggcttttcatatatgaaataaagttcttggttaattgtgggttattttctactggccaatatccaccttgattcaagtctaacttcacttctacaccaaagcttttctcaataccaagacagatttctttgagacgttgatcgattgtcaaaatcatattttgagttaagccacgaatcgtgccctcaattctagcttgaccagcaattacatttctaatcgtaccagcttcgattttacctagagtaataacaccactttgaattggatctatgcttcgtgaaataatagtttgaacctgcatgatcaaacttgctgctgcaactaccgtatcatttgcatcttgcggaaaagctgcgtgtccacttttacctagaatatcaatattgacttcagttgtaccagcaaaaagtgtacccatccgacacccaatgctaccagcaggcaaagcggggttatcatgcaagccatagaactcgtcaggtttaaattgatcatgaaaaattcttttttcataagcttgcatcccaccactttggctttcctcggctggctgaaagaaaaaaagcaaattatcttgtggctgattttcactaaaatagcttaacaaacctaatgccacggtcatatgaatatcatgtccacatgcatgcattactccctcatgttttgatgaaaatgccagtccagttttttcagtaactggtaaagcatcgatatcagcacgatatcctatcgttctgtgtggttttcttcctttaactaatactagaattgcggtaggcagtgtcgacggtatctcaacttccaaataatcttgcttaaatttttgaattacctcgattaaataatcatgtgtttctttttctgctagtgctaattcaggtatttgatgtaaatgccttctaatttgaattaactcactttcacttaaaactgacattttataactttctcagattatcttctagttccgtcttactactagttttttcatcaacttttttaataattttagcaggaacgcccgctaccatcgtatgtgctggcacatcatgagtaactactgctccggctgcaataacggctccttcacctacatgaacaccctcaatcacaacagcattagccccaatcatgacattatcatcaatttgaaccggtttagctgaagcaggctcaattacaccagccaatacgctaccagctccaatatgacaatgttgtccaacaatggcacggccaccgagaactacgcccatatcaatcatggtattagccccgatttctgctccaatattaataatggcacccatcataattactgcattattaccgattaccacttgatcacgaataatagctcctggttcaattcgagcattaacttttttgaagtccaataaaggaactgctgaatttcgtgcatcattttcaatatggtaggccgtaatttgatgattttcttttaaaaatggttcaatatctttccagtcaccaaagatcgcgccagaatgagcttcagtaaaattctcaatttcctttggaaaatcaatttgtgctaaatctcctttaataaagacttttaccggtgtcttttttggtgcattaccaatgtaatcaataatactttttgcatctaactttgccatcttttttctcttttctaatttaaatatgattgatctaaatgaaccaagtcttctaaactttcacgcttaatgactaattttgctttaccattttctgcaaataccactgctggtcgaggattacgattataatttgaagccattgaatacccatatgcacctgtatccaacatcgctaacaagtctccagctttgacttgtggcaaagcttgatcttctgctaatatatcgccactctcgcaatacttaccagcaatacgaacatgttcagtcaaaggcgcttgtggatcggtggctaaaactgtttcatacttagcctgataaagtgcagggcgaatattatctcccatcccgccatcgacagtaatataagaacgataacctggaatatccttacggctacccaccgtataaaggttgtaaccggctggaccaacaattgatcttcccggttcaatatcgatttcaggtaaaggataattcattttttcagcttcagttttgatcaccttaacaatcgtcttaacaaattcttctggtcgtaatggatgatcttcttgggtatatttaatcccaaaaccgccaccaacattaataacttgtgcaagatagccatacttttctcgccaatcttgcgctactaccattaatttttgtgctcccatttcaaagccgtttaaggcaaaaatctgtgagccaatgtgagcatgaatccccaacattttcatcctaggattagctagaacttgttttaatgccttttctgcttgacctgattcaagatcaaagccaaatttactatcaatctgacctgtttgatcatattcatgggtatgtgctgaaatccctggtgcaatacgcaacatgacactaatcgtagcatcgtacttttttaaaacttgcgccaataactgaatctcatgaaaattatcaataataattttgccaacatgattttttacagccatttccaattcagttaatgatttattattaccatgaaagctaactctctccattggaaaattggcttttattgcagtaaataactcacctgctgaaactacgtcagtgtatgctccctcttctgcaataacttgatacattgcgattgctgcgaaagctttacttgcataactaacagcataggccatgttttcttcttcaaaaactttcttaaaagcccgaatttgtcgacgaatttgatcgacatcataaactactaatggcgtaccatacttttgagctaattctactatatcaactccaccaatcgttaaatggccttgctcattaatctgatctactgcaatttgtgaattcattttgttctcctgtctttttcaggcgaaacgctaataaaaaatccattgtctgcgccaaacaaacaatggattaatttctacttaatctatggtcgatagcgctccgcgaattttgttcgcgacagtccgcagtttattcaactacgccccagctcaagcctttagcatgactcagcttcggcaacctccccttttacaattcatcttcgttttgcccaactcagaattgttacttatgtcggctgcgcctcttcgattgactgtagtttacaattttataaaaacatagtcaacaaatttattataaaaatttaattttatttgtaacaatgcggcatttagagtgataaattacagtcatcacttgcaagattaaaaaataatgttagaattcaattaaatttagtctgacttttttatttaaattaatgatttctgaaaacaaacggagttttgaaatgaaaatcgtaaagtttggtggctcttctttagctaccggtgaaagtgttgcacaagcaattcaaattattctcagcgatcctcaacgacaagtaatggttgtctctgccccaggcaaaaggaatacaacagatatcaaagttactgatctgttaatcaagtacgcagatttagccttaaagcacaagaattgtgttgaaatcgtgaataaaatttttagtcgctatcaagaaattggtcattattttggcttagctgatacggaattaagtattattaaacaaattttattagagttgcccaatcagggttatcctaacgaaaaatatcttttagctgcatttaaggcacatggtgaacggcttaatgctcgtttaattactttaattttacgccatcaaggaattaatagtcgttttcttgatccggctgaagccggtttaatcgtgactggcgagcccaatgatgccattgtcaatccagagagctacttaaatcttgaccaaattaaaattaaggctgatgaacgtatcgtatttcctggcttttttggcatgactccgtctggtaatatcgccactttttcccgtggcgggtcagacattaccggggctattctagctcgcggctttcatgctgatctctatgaaaattttacagatgtcaatgggatttttgccgctaatcctcatattattgagcatccccaatccatcaagaaaatgacttatcgcgaaatgcgagagttgtcatatgctggcttttctgtttttcacgatgaagcattgattcctgctattcaaggacagattcctatcaatgtgaaaaatactcatgatcctagcaatcctggcactatgattgtcccagaaaaggattttgtcccagataatgcaataaccggcgtaaccagccaaaaacatttttccgcattatatttgcataaatatttgctcaataaagaagctggtttcaccttacgtatattacaaattttataccaacataatattccatatgagcatatgccatctgggattgacgatattaccattatttttaacaatgattttctaaacgatcagttaattgatcaaatttgtaatgaaattcaagctacaattaatccagatcaactcgaatggattgaagattatgcaattattatggttgtcggcgaaggaatgcgacaaaaacataccatcagccgtcaaattatcgattctttaggcgatcatgatatttcaccacaaatgatcaatcagggagcttctcaaatttcaatcatgatcggtactaaaaaagaaaaggctgatgaagcagtaaaaattatttatcaaaagttttttaattagggggcattatgattaatttattcaaagttcacggttcgcaaaatcatttctttattcttgatcaaacacaattcgaacacgaattaagtgacgccgagctaaaaaattttacgcaaaagattaccaatccacaaactggactgcttcacggagcagatggcgttttagtagttaatcatcctgtgcattctaactcacttggccagatgcgtgtaatcaatgctgatggaagtgaagcatcaatgtgtggcaacggtctacgcaccgttgctcgttacctaagtgaaaaaacgggaaaagataatttcctagttgacacaatgaatgccagcttacgtgttagaagagaaaaagattttgcttctaacgtgccagcatttgcagttgagatctctcctgtacgctttaataaagaggcactcccttttgataatttaggacaagaacggattattgatgcttggttgccagaaatttatcctggattacgttttacttcaattgccgtacctaacccacatttaatttcttttgttaatcaagcagaaattaccggcccgatcttaggcattgttggtaaaaaattaaatagcaataatccctactttacagatggcgtcaatgttaatttcgcgcaaattttagataaaaataaactttttgtccgcacttacgaacggggcgttggttttaccaatgcctgtggtactggaatgtccgcgacttctcttgctcttactttaacccaccccgaaataggcaacttaaatacaccaatatcagtttataatcctggcggtatggttaaaactatcgtgcattatgaaaaaaatagttattggatcgagcttattggtaacgctacttttactcatcgaattaagctttctgaagctgacttaaggaaaggtgatttttccaatgtccagatccaaaagactgctgaacaaagtgcttatgaaaaatttattgctaatctgccaaagttcaatgacattacaactttagcgtaaaaaaatggcttgcaacacgcaagccatttttactttttaattattaatctaagtctttcaagccatgctttttcttggaaacgcgataagctactaaaccaaagaaaattggaccaaagcttgtccaaaaagcagttgcatatctatgctccaaaactggttgcaaaaccgtaaatataattccggtgcaaacaatcagctcaacaaagactactaacgcaaccgtccatttatagttagtaaacactctaaacttgcgcggataatcttttttaagaaagaatggaaatgcaccgatcaagaaaatataaggtgcagtagcggctacgttacccatatccgtcagaatttgataaaagctagtcgctgcgctaccaccgaatgagaccaccgcaattaataggcaaacgaagacagtttgagcccacatcgcattagcaggaataccgtgtttatttaatttagtcgctgccttaggccataaacgtggatcagatcccatgatgaaggatttaattggtgaataaagcaaaacaaagagagcacctgtcattcccatcaaaccagataaagcaattgctctagtaaagaatttaccaatcaataaactcgtgttaggatccaaatgaagtgcggttccaaaggctttgccaagtgtgccatatacggtatacgtaatatttccagtattggcattggctgctaaaatatctttttgataattaactgaaaagccggtcataaaaatcatcaaaacataagaaataatagtgaacaatgacccaataattaagcctttagggaaatctttttctgggtgtttcatactgtcaatcacaccaccgacggtttccatcccaccatatgcaaagactgcataaactacgaaagaaataatcgtaattggcgtttgaaaacttttattaggcgaaataataaaactttgccacccagtaatcggctgagccaattgcccatgattcataatcaagaccgttaaactagctagaataaagactgcattcattacaatcatgaaccaaccaccgattgatgacataattttaattccagttatccctctggaagacaggtacgttgatacaatcatgaataaaattgctagtacacctatcaattgagtaccatgcaagcccaaaatattccattcttgagttgtatctttgccaaaaataagggcagagattgaaatccaaagccttgaggcgcttgcaaccagccacagcacccagttagccagccatacaaaagtcccaataaaggcctatttttgtccaactgagccagctaaccatgaataaataccaccttgagcatcatgaaaagcagacccatattctgccatcattaagccagctgggaaaaagaaacagacgccagccaaaataaaccaaatgatcccagcatatgtcatttgctcataagaaacagaaacattgccaaaaccataaaccgttgtgataatcatcaacacaaggctcatagtcgtcaatgattttttagtttgtgaattttcatcatccaagataaagcctctactttctatttacactttccattttagcatcgtttatcttgaataaatttattctaattttaggctcataagaaaaaactactagttattcactagtagcccttcatttttattcattaattcttttttcaatccaattacttaattcagttacatgtaatttagtgaccgaactaaaagtcaaaacggtgacatgatcatagttgagattcaactttttctttaagcctgacatcaccttattagtttgactcttttttattttatccatcttggtacaaactaccaaaattgggatatttagatattgagcataatcatacatagcaatatcatctttggttggttcatgacgactatctactaagataattagtccctttaggttgggtctagtttctaaataatcttgaatcatttcgccaaattcttgccgcttcttctgtgaaactttggcatagccataacctggtacatcaaccaaataaaatttttcattgactttgtagaaattcaaagtttgtgtctttccaggctgtgacgaggtcctagctaagtttttacgctttaatagggtatttatcaagctggactttcccacgtttgagcggcctgctaatgcgatctcaggcaagttatctttaggatattgatcttctctaacagcactaactgcataactactgctttcaatgatcattgacacttacctgttctttattatcagtatttttgcggattacctttggcttagcgtgcttagtaattacgtccttagttacttcaacggtctcaatatcctcttcactaggagtttcatacataatatccataattgaattttcgataattgttctaagtccacgtgcacccatatttctttggattgctaagtcagcaattgccttcagagcaccatcagtaaacttcaaattaacatcatcaagtgataacaacttcttatactgcttaactaaagcattctttggttcagttagcactctgaccaaatccttactactcaatttatcaagcgtagtaataattggaattctaccaatgaattcaggaatcattccaaatttaactaagtcagctgtagtcaaatggcgtgtccaatcatctgcattaattttatctgcctcattttcagcaccaaagccaatggtctttttacctaaacgatttttaacgatttgttcaattccgtcgaatgccccaccaacaataaatagaatgttagtcgtgtccatcttaatcatttcttgttgagggtgtttacgcccaccttgaggtggaacagaggcaattgtaccttccaagatctttaataatgattgctgtacaccttcacctgaaacatcacgcgtaattgagacattctcagattttttagaaattttatcaatttcatcaatataaataatgccacgctgtgcacgttccaaatcataatcagcattttgtagtaacttaagcaaaatattttcaacgtcttcaccaacataccctgcttcagtcaaggtagttgcatcggcaattgcaaatgggacatttaaaatacgagccaaagtctgagcaagatatgtcttacctgatccagttggtccgatcattgcaatatttgatttttgtaattcagttgaagaatcaacatccatttggctaattctcttatagtgattatatacagcaactgataagacttttttagcacggtcttgaccaataacatattgatcaagttccttttttatttcaacaggcttaggtaattcacgagctgctttaagtgaatctgctcgtaattcatcgtcaataatttttttagccaagtcaacacattcattacaaatatatacaccgttaccggcaatcattttcttaacttggtcttgagttttgccacaaaaagcgcatttaatctcttcttgatctgtaaactgatttgccattatttttcctcctatatctaccaaaaatcagattatcataaattaactaatattgataaatattaagctcgaacagcaaaaaaagcggcctatagccgctctttttgagaaattagcaaatattactattacttgctttccttcttgtcatcgtcttctttgttttcaagctttgacttagcaacttgcttagcattatcagtaataagatccatagccttacgtacagtaatgtcgtggcctaacatgtcatctgataaggtgttacgtaccatcttttcatccatgttgtattctgaggcaagatccttgatttctttatcaatttcttccttagttgccttaaggtcttcagcagcaacaatagcttcaagaactaagttagttttaactctttcagctgcattcttttcaaattgtgaacgcaattgttgttcgttggtattagtcaacttgtagtaagtttgtgggtcaataccttgacgttgcatattacccaagtattggttcaattgagtatcaacatcttcttgaatcatagcatcaggaatttcatcgatagtagcgttgcttacagcaccttcaattgcagcttcttgaatagcgtcgtttgcttgttgttccttttgttccttcaagtccttcttgatcttttcctttaagtcatcaagggtgtctacagagtcatcaacgtccttagcaaattcatcgtctaacttaggaagttgctttgacttaacttcgtgaatcttagttgcaaagtgtgcttctttaccagctaaatcctttgcaccgtaatcttcagggaaagttacaactacatcaacatcatcgccggcttcatggccttcaagttgatcttcaaagccaggaataaatgcacctgaacctaattcaagtgagtagttttcagctgagccgccttcgaatggcttgtcgtcgatagtacccttgtaatcgatagtaacagtatcgcccttttcagccttacccttcttaagaacaagttctgcattttgttcacggcgcttgtcaagttcagcatcaatgtccttttggtaaacacgagtgttttgcttaggaacttcgatacccttgtagtcacctaacttaacttctggttctacagtaacagtagccttcatagtccaatccttgtccttatccattgatacaggaacaatttgtggttggccaactgctttaatacctgcttctttaacagcagcagaatatgcatttggtaatacaatatttaaggcatcttcatataatgcttcttcaccgtaatattgatcaaagatcacacgtgatacgtgaccctttctaaagccaggaacacgcaagtttttctttactcttctaaaagcttggtctaaacctaatttaatttcatcttgtgaaatatcaaaagtaagatcaccggttgtcttaccggtcttttcccatttaacagacattaattaaatacctccaatgtcaaatttgagtttgcatcttgcatactaagttatcttaccttaaaaggccgcaaaaaacaaatttaaaagaaaaaagatgcgctcctgtgaagaagtgcatctttttttaactatatcgttagaaattagtcaaggatttcagtaacctgaccggcaccaacggtacgaccaccttcacggatggtgaacttagtacccttttcgatggcagctggcttgattaacttaacagtaaattcagtgttatcaccaggcataaccatttcagtaccttctggcaattcaatttcaccagtaatatcagtggtgtggaagtagaattgtggacggtagtctgagaagaatggggtgtgacggccgccttcttccttcttcaagatataaacttgacccttgaattccttgtgggtttgaattgagcctggagcagccaatacttgaccacgaacaacttggtcacggtcaataccacgaagcaatacaccaacgttatcgccggcttcacctaagtcaagagtcttgtggaacatttccaaaccagtaacaactgacttaagaaccttgtctaccaaaccaacgatttcaacttcgtcaccgaccttaacagtaccacggtcaatacgacctgaagcaacagtaccacgaccagtgatagtaaatacgtcttcaactggcattaagaatggcttgtcagtttgacgttctggagttgggatgtattcgtcaacgatgtccatcaacttaagaatttgttcttgagcttccttgtcgccttgtaaagccttcaaagctgaaccacgaacaactggaatatcgtcaccagggtaatcgtattcagtcaacaagtcacgaacttccatttcaactaagtcgatcaattctgggtcgtcaactaaatcacacttgtttaagaaaacaacgatgtagttaacaccaacttgacgagcaagcaaaatgtgttcacgagtttgtggcataggaccatcagttgcagcaacaactaagatagcaccatccatttgtgcagcaccggtaatcatgttcttgatgtagtcggcgtggcctggagcgtccatgtgagcgtagtgacgattttcagtttcgtattctacgtgggcggtattaatagtaataccacgttccttttcttctggtgcagcatcgatttgtgagtaatcttcagccttagccaaacccttgtcagccaaaacagtagtaatagccgcagttaaagtggtcttaccgtggtcaacgtgaccgatagtaccaatgtttacgtgtggcttagttctaacgtaatgttctttttctgccattaaaatgaccctcctgtaaatttgcaagaagtccgttgagataagttaacggataattctctgttgaatattgtactactttcttcggcaaatgcctagtaaaaaagcttaagcgaaattgcctaacgaaaatatcctttgctaattatactaaatagtttgaaaatgtaaaccttttttacttattttttattgcggtaagtatttatatattttttctagtaatttttgatgactacggccatcttttctttgtaaaaatgagactaaatcactagcaaaactgtcaggctcatcaatatattggttaattttagggtaaagactgcctaataccaaattcacttctcccagcattaatggcaactgacttggactattgtgaaatttgcttccaatgctagaaataatttcacggtacttaggttctttttctagaagcagtgtattcgccggaataaagctctccatctggcctattacccaaatttcaaacttttcttcaagtcccaagcgaactaagtcttcacaaagtgacaacctaacagcaaaatctggcgttggatctaataagacgcttcgtgcaaaagctttaaaattaggcaggtttaacttatgtaaactttcataatccgactgagtaacctgttctcgttgtttaaagttttgcataatctgccgctgtttttcttcagaagctggttttaccttttctgataagtccaccccaacaagattttttagttgtagagcttcaataaaaaaattatttttagctagaatttgacagtaacttttaaatactcgctgatcagaaaaaagatcaggctcctctttaattaaagcatatgcctgatcttcttgtttattagcgcaatagagtttgcagagtttcaaaataacgtccaatgaatgctcttcacgtaatgcttcttctagattttgaatagctgcttcgagatctcccttacgctcatcttcttcagcaagtttcaataaattttgttggcttactgatgtcatttttagtctttcttattactttcttttttcttatttatttttttattttcgtctttggcatggttcttattgtcattttgtgctttttcattgcgtttctgcatagcacgatgacggttttgatttacttccatgaccacgggcaagatcactggacgacggttagttttcttgtataaaaacttctccaaatcaccgcggatatcttgcttcaattcagtccaatcaaactttttgtgttcaaaattggcctgaattgcttttttaattacatcaattgaatcactcatcaactggcgattagccttgatatagacgaaaccacgactagtgacttttggctctgcaataatctttttcttcttacggtcaattgtaacaaccgcaataaagattccgtcatctgataggacctcacgatcacgtagcacaatattaccaacatcaccaacaccagaaccgtcgatcatggtatcttcacctggtactgggtcagttaagaagaaacgcttctgcttaaagtcatattcaagacagtcaccattcttggtaatataaatatctttaggattcattccagctttaatagccaaatcacgtactacttcaagtaaacgatattcaccaattactggaattaagaattttggcttcaaggttgtaatcaaaagttgcagatcacgaccagttgcatgcccactagtatgtatatttctgcctaactggataaccgtaccgccagccttatataccaaatcactggtttcagctaccatcgtttcaaccgcatgtgacggagtagttgcaataaagaccaaatcgcccttatgaatcgtaatcatactatgacgcttcttagccattttttgtaatgagttaagtggttcacccatacgcccagtctctaatataactgtctgctcatctggcacagtcttcagatccttaactcgcatcaacaagccttcaggcacatctaaatagcctaatttcattgaagttctaacaatcttagctagatcgcggccagttaataagacgcgtttccctgttgctgctgcagcatttaaaacttcttgaacacgattcaagttagaggctttagcagctacgataattctgcctttagcatttctgaagacattagtcacaaatttaccaatatcttgttcagatgcattagggaaagatgcttctgcattagatgaatcacttaaaagcgctaaaacgcccttttgttcaatttcagctaagcgatccatatcagtccgataatttaacgcagctgttggatcaaatttaaagtcaccagtataaacaatttcacctgctggtgtatgtacatctattccaagtgaatcaggaattgagtgtgtcgtatggaagaatgaaatacttgcattcttaaaatcaatttcagtatctgcatcgattacgtggaacaaactattcttacggcgtttgttttcgcgttgtacttcaattttagcaagttcgatactcaattgtgaaccaaatactggaatatcgtatttacgcaaaatgtatggcaatgcaccaattgaatcagcatgcccatgtgttaaaaagatacctgctactcgatctccgtattgttcaaagaaatcaaggtcaggaattactacatcgataccaaataaagaactatcagggtactttaatccggcatcaagaacaaaaatttcatcattaacttgaacggcaaacatgtctttaccttgttcacgcacaccgctcaagatcataattttgatttgatcagccattatatttccttttctatctaatttttaattcttatggatctatcgatctcaacgtaaaaataatctgtttcaattttagcataaagaataaaattatggcagagacaaaaaaaagccagccttttcggctagcttcattattcaatattatgtgaaaattaacgacgaagacctaacttcttgatcaattcacggtaacggttaatgtcgttgttttcaaggtaacgaagcaagttacgacggtgaccgatcttcttaagcaaaccaacgtatgagtggtggtcatgcttgtgactcttcatgtgatcagtcaagttgttgatatcagcagtcaaaagagcaacttgaacttcaacagaaccagtgtcaccttcgtgagttgcgtattccttcataatcttttctttttcagtctttgaaattgccatagttaaattcacctttcattaaataattgccgttaacaacgtttatcgtcggcgtgaacaaataaacagcgttagcggttcacaacagtcataatcatacacattattttttaaaaaagcaagcagaaattaccttgcatccgtgatatttcttaagtataatggatgaagtaaatttctaaatcattggaggtgaatttcatgccacaaatcaaatcagctatcaaacgtgttaaggctcaaaatgctactaacgaacgccgcgcttctgaattaagcaagttaagaactgctatcaagaagtttaagaacgctgttgaaagtgatagtaaggaagacgtctccaagttgcatttagaagctgaacgtgctttggataaggctgcttcaaaaggcttaatccacaagaacaaggctgctcgtgacaagagtcgtttaaacaagttagcaaacaagtaaatcttacttattactaataataaaaagaggagatctgcagtgatctcctctttttgtatactcttagacatttaagataaataatttcaaaaaattatcttctcggtaagttccatttttatatttaaattctaagtcgattgcatcccttaataaattttctagcttgtctatcttcaaccgattacgtagggctaacttaaccctatagggatgaacgcctaattcttttacaatttgtggttcgctacgacctctttgtgctaagatcttaacgaccaaaatcaattctaattgattttcaaagaccgctaataattgaattggattagtcccttcacgtaattgattatctaagcgctcaactgcttcacggtaattcttatctaaagccgactccaaaatagcgaaaatattttgtgctagggacaaatctacattttgcattactgatttttcagtaattttgttatcggtagctaccatttttagcttttgataattgcttaaaatagtgtcaattacctgatcactccgctcaattagcagctgtaaagctgactgtgtgattatatatccctcatctttgatcaaggctttagtcgttgaagcaacttcatagggcctaatttgtggctcaaccacattgaattgctttagaacagttttagtcagttttttacgcctatcaattttttcataagaagcaacaattactactacatcttctaaatcagctaagttttcaaaaatcttttgtaagtcatcaatttgtttctgtaattttttagataccttagctgttaaaaagaaaggatttttgactacaataaatttctgttcactaaataaactggattcagttaagctcgcaatcaattcatctaagccatcgctttcgcaatcgacagtcacgtgctccaaatctttaaagcgatcttccttggcatatgatctcaccaagtaatcattgagaaagtcatctgcaccccaaattaaggtatgtggattattgttatttgtatttttaaacaaagaaagtaaggtcattttttatcccgctttaaaaagtaactaaatctaggactttgcagtccgccataataccagctaatcataccacagtcttgcgttgaaacccatggtatttgctgttgagttagtgtcgttagcgtctcttgatgggggtgcccgaacctattttttcgaccagcagaaataaaaacttgcttaggatggattgcacgtaaaaagtctggattggatgatgttttactgccatgatgacccaatttaaaataatctacctgaagtttcatcctctgcataatttccttttcaccatcttgacctaaatctcctgtaaacaaccaattcttattcgctactctaaaaagcaaactcagggaatcttcattctttccttctcctgcttgatatggataaaccacattaaatgtaatctgcggttctttcacccgcattcctgcaagtaactccaataatttggtatcttttacacgaccatctaatctcttttgaaaagatggattcttaattagtccttcggccataaataatttcttaacattaacctgctctagtaatggtcctaaatcaccaacgtgatcggcatcttgatgcgaaacaaagactccatcaattgtattaattccctgacttttcaaaaatggaatagtaattcgatcaatctgaggtgtctgctttttgccactaaagtttagtttcccaccagtatcaattaaatataccttgcgaggaaatggcgtagtcactagaatactatctccttggcccacatcaatgaaggttacttgccctcgcaaaggaaaatgaatcatgctgaagaaaattacatacaagctcaacaagcccaccataattttcttactattaaagcgccagttaactttttctcttaaagaaacaattaaaataatcgttactattaatagcaacagacactgccaccaattaatttgcccaaaagttagtagtcccaacttagtagcagataattgcccaatgattttctcacctaattcaagcactttttctaataccggagcaaaatctttagtcagaccaaacgtcacaatattgaaaaaagcaattggtaaaactatccaattgaaatatggcactactaacatattaaaaattacagttaaaaaattgacctgataaaagaaaagcaatagtaatggcgttaataaaatatttaacaaaattgcttgtttaaaactgccaaacttatcagttaactgtaaacccaatgccaaaatatagctcaataaggctccagttgccagaaataaacgcggtactactaaaagatgtaaaatgcaggtcaatcccagcagatctatcgacgcaacatgatatttcttaaacttacaaattttgcctaaaaagtaggttaaactagctcttacaaagccggcttgaccactgcttagaaaaatacctagcaataaaaccaatgtacagcagacaaaagtttcttcatccgtcagtttcaagttaaaacaaaatacactaattaacaagacatagattccaacatgtaagcctgaaatgcttaacaagtgaataacacccaaatctcgataattatttagtatttcttgattttcttgagcattattttcacccaagattaattcactagcgaaaaagcctaataactgtggcatcttggcaaaatagttctgcaattcaaaacgtaattgatgcaattgatccccaaaatcagtaatcgataatagcttcatttgacaactactgtatttcaatttttggtaaatctgttttgcctgataataattctgaaaattaaactcaccaatattagttgctggctcaattgaattgcattccccattaatttctgtcactaaaatagggttcccatgcttaagcagttctttttgaacatctgttaccttgccaccaattaaaattttaccttgagcgaaattacccacacctgttaagtagtcgtctttaattcttacctgatcagggtaaattcttaattggctctgctgggttaaaacaaaattggtttttggtttacttaaaaaaatcagtaatagaaatgctccaactattagactaactatttttaaactaactcgatatttttgtactaacagtagcaaaaagtaacccagaaaaaataaagctactattttttgcaccattgttgtacaagaaaaagccaaaaaagagattgtaattagcaacaaagcggttattaagtaaaagccaacttcatttttaaacagccaattgatctttaaggctcgcaaaagttttttctcctattcctgatacctgcattaaatcttctatctttttaaaagaaccattttgttcacgataagcaataatctgttctgcctttttttgaccaattccagttaacttttgtagttccgttacattagcagtatttaagttgatcttagtgccatccccttgattacttgggctactgctactagtactcccactattttgactattatcagctgatcctgcagttgccacattttcaaccttttcacccttgtaaggaatatgaattttatcttgatccttaagcaaagtagcgcggttaatagcttttaattgtgctctagcagtagtacctccagccgcctcaattaactcctgcagacgagcaccatttttcaatgtatatactccctgatgcttcaccgcaccggaaatatcacaagttacagtcttagaaacggttgttgaactactgctagtcactgcattagtattagtggttgcacctgaactactagtgctagactgcataacttgatcctgcactgcagcagcattttcttgatgatcccctttcttcaatccataaaatccaactacaagaattattgcaccaatgagatatgcttttttctcaagcacaaattcttttactttttcaaaattcataaaaatcacctctactatttattacgcaaaaaaagcccagaattttttctagacttcaaattttttgaatttttttagtagtgtgtctttagatagtttaatgcatcatcaaaagtgctcacagggacaattttcattttggtgtgaattttctttgcggttctcttagcaaccgcataattagtttcacttttcttcacactggttgaatcagtcggcgcaaagaagacctctgcaccttctctgctagcagctaccacttttttatcaacaccaccaatgattcctacttttccggtaggtgaaatcgtacctgttcccgcaatcttatgtcccttacttaagttctgcttggtaaagacctcatagctttcaagtgtaaacatcaatccggctgaggggccaccgatttcgccagcattaatttttaacttaggcttagttttcacaactacatgctcaactaattgaatcccaattcctggcttattagtaccctttactttaacaattttgccagtaaagtgtttctcttgcttaccacgcaaaactgagattgttactcgtgcaccaatcttttgtttacgcaaataatccatcatctcttcagttgagctgaaacgatgcccgtttgcgcctaaaacggtatcaccaatttggagcttatttttaaaactagaatttttctggacttccattacataaacgcctagatattttaagctatgctggttacctgcttttttagctgcataataaattgcattctgctgacttgtttccatataccagttttgcaactcattatattgagcactagtttgacctcctagcagctccttgcttgatacacgctcatcatacggacgagtaaaactccatagatattgcaaaaccggagccggccgactagttatgctaactgtcaccaaataaaaattattcggacgtttatttgatgacttaataaactggcccacgggcattgcctcaccaggatattcaatataataatcggtcggccaaacagcaagtaccactaataaaacaagcgcaattagtgccaagagccaattacgcaagtgctttttcgattgattgtttttcttattattcatgttttagcttctctctcaatgcaatcgctgcttttttaggtaaaaacagactaacatcttcatcaaaacgagctaattccttaatcatgcttgaagctacaaaagaattttctggactcgtaaaaagcaaaactgtattcacatctggagccaattttttattaatcccagcaatctcctgttcatagcggaaatcagcactgttgcgtacaccgcgcaccataactttagcatgcaattcatgtgctaaatttacagttacttcttccggtctttctagcacttcaatattaggtatttcccttagtgcatccctgattagatcagcacgttcttcaggcgtaaacaagtatttcttagctgtattggtcatcgcaactacatatactttatcaaaaatttcagcagcctttttagcggtctccacatgcccattagtaatcggatcaaaactccctggaaataaagcgattgtcattattagtcctttcgataaatcctcacaattgtttttcctaaatggtgttctttgatcaatgaaaaaccagtaatttcacccagttctgtatgatcatcagtttctgctaccacaattgcatgatcattaagtaggttcgactttaccatctgcaacatgtccttagcgattttttctttggcatagggcggatcaagaaaaactagatcaaacttttcatcattctcagaaaataattttaatgctgcagagctgcgcatattataaacattaaaacgctgctcttccttagttaaagcaacatttttcttaataattgtacaagcagcatgattaatatcaaccagactcgcatggtcacagccccttgaaacagcttcaattcctaaggcaccactaccagcatataagtctaaaacattaccaccctgaaaaaattgtcccaatgaattaaaaagggattctttcaccttatcactggttggtcttgtccgattacttttcaaagtaaataaatttcttttagcatatttccctgaaataattctcattttagttgattctcacttttttcttgttcaagttgcaatttcttttctgctttttgggccatctcagctaattgattttcaatatgttggctatccaaatttacttcttcttcagctgaaatttcgacatgattaacaaaatccaaatgagcaatttgtcctttgatttcattgcattcgttgcgattaacataaagaacacaatatttcatttttttagaaaaataaacaatgtcaccaaaatggcgcaacttatattgatcactaactgattttaaataaataatcaatgctacccttttaattaagtgggtactttcaatttctttattgatactcatgcaactgtttcatccttttcctgtaacattttttcatttgctgaaacgttcagtactaaaccaatcgcagcagtcaagacaatcattgatgaaccaccatatgaaataaatggcagcgtaacccccgtaatcggcaacaatcctagtactgcaccgatattaaagaatgcttctgtaaaaataatagtcgtcacgccaaagcaaattaatgcgtcgaattgagaaaccgcgtgaaccccaacttccataatctgccacatcaaataaaagagtaatccaaccaataaaattgtcagaatcacacctacttcttctgctgtaatggataaaataaagtcggtatacggctctggtaagtaacctcgcttttgcatactattacctagtcctacgccaaataatcccccattgtggattgcataataggagttaactagctgggccccacctttttgctctaattcaaagggatgcaagaacgacattagtcgttggaattgataacttctttgtaaaaatccaggattccaggcaactacaataaaaaatacagctgtcactaagatcacaatcccagctaaccaagttaaagctaatttagttggaacccctgatactgaaaacattactaaagtgatcataaataaaattgctgtcccaccaaaatcaggttcaacaataaccaaacacattaaaaaagccgccaaaattgctgggtgtgacaaattatgtttgatcttacccttgactaattttccatctcttctgtctagtacatatgacaaataaatgaccagagccaatttagtaacttctagtggctgcaaattgataaagcccaagttaatccaacctacagcaccattaactgccgcactactgccatgagcaaaacgtagaaatactagccatcctaacataagtatacaaattaataaaaatccccctacaaactttggatttttaaatactttgattcttaatgcaaaaaacggaatcccaaacaaaaagaaagctactatagcatagattgcttgccgtatcccatagacatttggcttaaatccattaactaataaaatatctgaactagctgaatataccaaaattatcccaaccactactaaaataagatagggaataaaaatctggtaattaagataacgtaattttcgacgcacaagcgttgcccctttatctaaataatacttttttcattataaaacaaaaagatcatcacttctatcaagtgacgaccttttaaaatttattaaactatcttagttagcacggttacgcttcttatcagacttttgacgttctgaagtgttcaaaatcttcttacgtaaacgaatagattcgggagttacttcacaatattcatcatcatttaagaattcgatagcttcttcaagagtcaacgttctaggagtcttaatagcagcagcgtggtccttaccggcagcacgagtgttagttaagttcttacccttagttacgttaacagcaatatcacgttcacgtgatgattgtccaacaatcataccttcgtaaacttcaacaccagcaccgatgaataactcaccacgttgttctactgattgaagtgagtaagtagttgattgaccttggttaatggataccaatgcaccattacgacgacctgggttccagttctttactactggcttatatgcttcaaaggtgtggttcatgataccatatccaccagtttgtgacatgaattcattattgtaaccaatcaaaccacgtgatggaactaaaaattcaagacgagtttgaccattaccagttgattccatattcttcatctcaccttttctttgtgaaagtgagtcaataacagaaccaacatattcatctggagtatcgatttgtactgattcaaatggttcgcacatagtaccatcaatttcacggtaaataaccttaggacgtgaaagttgtaattcgaagccttcacgacgaagttcttcaaccaaaattgaaaggtgaagttcaccacgacctgaaacagtccaagcgttcaattgatcagttggttcaaccttcaaagaaacatcggtacgagtttgacgaatcaaacgatcttcaagcttcttaggagttacttgatcaccttcacgacctgcaaatggtgaatcgttggcaacaaagtccatttgaagagttggtggatcaatcttaagaagtggcaatgcttctggatgttcagctgatgcaatagtttcacccacgtagatatcattaataccactaatggcaataatatctccagccttagcttccttaatttcgttacgtttcaagccaaagtaaccaaataacttagtaacacggaagttttgagttgaaccatcacgcttcataacagtgatgttgtcactaactttaaccttaccacggtaaattctaccaacaccgatacgaccaacatagtcatcccaatcaagcatggtgatttggaattgtaatggctcatcagagttgtctactggagcaggaatattcttaataatggtatcaaagattggatccatagtttccttttgagtacttggatctggatcatatgatgaagtaccattcaaagctgatgcataaacaactgggaagtcaagctgttcatcgttggcacctaattcgatgaaaagttcaagtacatcatccaaaaccttcttaggacgagcgcctggacggtcaatcttgtttaaaacaacgataggttttacgccagcttccaaagctttctttaaaacgaaacgagtctgtggcattggaccttcataggcatcaaccaaaagcaatgcaccgtcaaccatgtgcataacacgttctacttccccaccaaagtcagcgtgacctggtgtatccaagatgttgatagtagtatccttatacttaacagcagtgttcttagacaaaatagtaataccgcgttcacgttcaatggcatttgagtccatagcacgatcttccagattcatgtgttctggcaaagtatcagattgcttcaataattggttaaccaaggtagtcttaccgtggtcaacgtgggcaatgatcgcaatgtttcttagatcgtctcttcttttttctgacaaaagtattcctccccactcttcaataaaaaaactgtgactctgtcacagtttcggtaacgcattagcgccttatcgaagtgcttttcttaaatctgtatagttacgttagtgaattttaccacctaactgcatacgggtcaacgcttaacaatcaagttaaccctggatttttttatgcaaaaacaagcaaaaactattaaactatggtaaaaatataatgtagataataatttttaaaaaggagtaattattttgatcttaatgaaagatatcgtacgtgacggtgatcccgtcttacgtcaagttgccaagcctttaacatttccatttagtgatcactataaaaaattagctgatgatatgatgcaatacttaattgattcacaagatcctaagattgctgaaaagcaccaattaagagcaggcgttggcctagccgcacctcaagtaggtgaaggtgtacaaatggctgcacttttagttcctgatgatcaaggcaaaattatctttaaagaagtttatgttaacccagagattgtctctgaatctgttcgtcaagcttgtcttagcgaaggtgaaggttgccttagtgttgatgaagttattaatggttacgttccccgccctgataaattaaccattcattactacaccgttgacggtgaagaaaaaaccattcgcttaaaggattacccagcaattgtttcttctcatgaaattgatcacttaaatggtcacttgttctatgaccgcattaataagcaggatccattcgcacttaaagaagatacagtcgtaatttcttaattgttatttaaccaaaacaaaagcctgcagatgcaggcttttttgtataaaaaaagtcactggttaactaggccagtgactcatacattgggaattaagaagattgaagagacttcttataacgagcaaatgaatttattaatcatttactacatgattatcgtacaactgatgttattttacgtcaataacattgaccaaatttgaaactgtcaaatcttttgtgtaaatagatctttctcgtaaattgattttttaattatttatttaatcaaagtaggattctaaggtgtcctgaacctgaccaaagcctttatgaattcgattgaaataacggtcattgtagctcattgcctgaatgccaataaaagcatcaagcgactgttcagttggaaactctgccttaggcttagctttgcgcttgatcacattgttaaatgattcaatcatgttagtcgaataaattgaagctctgatctgcttgggatagttataaaagaccagcagatctggttctatgtctttcaagcttctgataacatggctgtaaaccttgccccatttggtatagaagtcatgcaggacagctgtggcttcttctttgtttgtctgttgatgcacctgtttgaattcgttcatgatcttttcacgatcgtcgacgcgtactttagcgcagatattgcgcatgacatgaaccaaacagcgttgaaaatgagctttaggataagtcctggccaaggctgttttcatgccaacaacaccatcagaaagaaaaagctcaacttgctttaagcctcgggatttcatgttttgaagcatatctgtccagacttcaatgttctcgctaggtgcaatgcagtagtcaatgacctccttgtgcccattaggcttgatgccaatggcaatatagactgcttcacgctcaaatgtttctcggcgcaaaggaaggtatgtcgcatccaaatagacgcagaaaaacttgtcgcttagcttgcgtttgtggtaagcctcaacctttggaatcatctgcttggaaatatttgatacctgagctggactgtaatggctgccatacatcttttcaattagatcggctatttccctggtggtcacgcccttggagtaaagcttgataatcatgctttccaagatatccgagtgctgcttgtagccaggcagcgtgtgctgatgaaattgaccgttgcgatcccgaggcacttgcacttcaattgggccaaattgcgtatcaactttgcggaaataagcaccatttctagagttgccagtattccagccatttctggcatagggatcatagcccagaaaggcagtcaattcagcttctaacaagttattaacagcctgttgtagctctttgcgcaataaatcatttattttgtctggattgaatagagcttgagcaaaatctttggtaaaatcattcatgaaggagttcttctttctgtatgtgtttttttgttcaaaccaatcatacgagaaaggaactcctttttctaatgtttaaagaaataaatttaaggaatcattcatccttacacaaaatattttacagtctcccaaatttaatcggtaaaaatcaaaagaaacataattatatacttaactttataattatgataaaatttttatagctattgagtaatttttactctacattgaacgtttatacattaataaggagaatcatttatgatttacaaagttttgtatcaaaaagacaagattgtcaatcctcgtagagaaactacacaaactctttatatggaagcagacaacatggtcgaagcaagaagtatggttgaggacagtaccccctataacattgaactcatccaagaattaactggtaattcgttaacttacgaaaaagaacatgctgactttaagttaacaacgttcgacaagaagtaataaagagtgcgaattaaaaataatgaagtagccgtttatgcaatcgggggtttgcatgaaatcggcaaaaatatgtattgtgttcagtatcaggatgaaattatcatcatggactgtggtattaaattccccgaagataacctattaggtattaattacgttatttcagactattcttacctaatcaagaatcgtaagaaaatcaaagctcttgtggttagtcacggacatgaagaccatatcggtggtattccatttttgttagaaaaaattcctgaaattcctgtctatgcgacaccatttgccctttcattaattagaggcaaattggaagaacacggaattttaaagacaactgaactacacgaagagcatgaggatactgttttgaagtttaagaaactttccgtttctttctttagaactactcactctattcctgatactttaggtattgccgttcatacaccactcggtgccgttgtctttactggtgactttaagtttgacttaacaccagtaatggatcaacctgcaccagattttcaaaagatggctcaattaggcaatgaaggtgtacttgctcttctctcagattcaactaatgctgaagtaacacaatttactaagtctgaacgatttgtagctaagtcactacataatatcatcactggaatccacggtagaattatttttgccacttttgcatctaatctttatcgtgtatcaactgctattcaagctgcaattgataccggtagaaaggttgcaatttttggacgtagtatggaaaatggcgttgataatggggtcgacttgggctacttaaatttgcctaaggatctaattgttgacgcagatgagatcaacaaactaccacctgaaaaagtaatgattttatgtactggttctcaaggtgaaccattagccgctttatcgcgaattgctaatggtactcaccgtcaaatcagcttacaacctggtgatacagtcatcttctcctctaacccaattccaggtaacacattaagtgttaaccacttaattaataagttaatggaaggcggagccgatgttattcacggaagagtaaataacgttcatacttccggacacggcggccaagaagagttaaagatgatggttcgcttagttaagcctaagtacatgattcctgttcatggtgagtacagaatgcaggttattcacacccagcttgctcaacaagccggtgtacccgctgaaaacacttttgttttatctaatggtgaagttgtctgctttggccctgatggcgctagaatcacaggacatattcctgcaggtgacgtttacgttgatacttctggtactgcagatgttggcaacgttgttgttcatgatcgtcaaattctttctgaagaaggtttagttgttgcagttgctacagttgattataagcacaagcgagtcttagctggtcctgatattctcagtcgcggatttgtctacatgcgtgaatcaactgagttaattagtcaagcgcaaaagcatgtttatcatgtgcttagaaatgaaatggctaaatcaaatagaccaaaagcaagtgacattaaaaaggcgatcaccgaaaatctttcagacttcttgtattccaagactgaacgacggcctatgattttaccaatcattatcgaaaagaaatagtaaaaaagactccttagggagtcttttattttagaaaatgaataatatgcataaaaaaattaaagttcagttattagttaatgaggtcgctgggaatggcaatgctattaaagctgataaagaattacaagatatactaaaagaaatgaatacgcgtggtgctagttaaatcgttctagacaataagccaaattataagctaaaattgcaatttccaaccggctttgaaagcctatcagactacgtgctcgattgttctcggcattgtaataggtcagaagcgaaaagtcgctttcaattgttctgcgaatagccatcaattgatgatcattgtgctttttagctcctgtcatatttttacgatatggtgtccaaagttcgtaacccatttgttttagctgttgatgcagttctttgcctaaatagccttcgtcgccaagaagatagtaattagatggatgggtattttctatcagttcaactgtctccctggcatcatgaactgatgcctttgttacgacataatcaagaatgtaaccgtcatcgctaacaatggcatgaactttgaaaccatagaagtaaattttcttggtggccttataaccaatgttggcataaccgcgaaaaattttagcacgatagtttcgaattggttggcaaacaggtaccggaaagctgtcaatgatcaagaactgtccattcaggtcaacctttttattcatttcttgccgtatctgataaatcaattgcaatagctgacgtgaacgccgattaaaacgtgagtgtgataaacaattgaaacattcacagaatcttctttgtgattcaattcctgtcttagcttgccagataagtaaagccaaaatcagactgtccgtagttttaatttgatcaatatttcgccgatgagtaaactcagccggtgcatacaaacgataccagtgccgacaaattatcactaaatctttaaaactaacttgtaaatggtggctaaaacgcttaagcttaaggcagttcaatcagatcagactcttttctattattactatttacaagtcgagtctaacaagattggacttttttattaactaaaacgatttaactagcaccacgcgtaaatgaatattccttttaagcgacaaaaaagtcattatcctggagaattagtcgttctagcacaaaattacgctaatttacatctctcttctgaacatgttttaatcgtagttggtggagatggctcctttaatgaagttttaaatggaataaagacttctaattatcctgagacagctattacttatttgcctgcaggaacaggcaacgattttgcccgtggtgctggattaaccgcagatcccaggcaattaatcaacaatttgctccgagatcctgaaccggaacaagttgattgtggttttttcacatcaaatattaaacaaattcctaagggttactttgttaataatttcggtattggttttgatgcctttgttgttcatcagagtaatcatgagcaattaaaaaaacacctcaatcacctcaattctggaaatatgatttatggcctaaatataatcaaggcactaattaagcaggatacctttacagtgactgttaaaactaaaaacgaaactcttcgttacggagatgcatactttgtcactactactaaccatccctactttggcggtggttttgctattttgccaaaagcggacatttacagtcaccatcttgatacagtaattgttgaaaaaccgagtttacgcaagtttctctggctttttggtaagctgatcaaagatggttcacacgttaatgcaccagaatttcattatattgaagctaaagaaatcctagttcaaaccaataaaagtgaatatgctcaaattgatggtgaagatattgaaaagcagcccttcaaagtaacatttaaagttgatcattttaatttattaaaataaggaagaattccaaattcttccttttttatatcttatctaaaatatctcttttcgaattatgattttgataatattggtcctgatcaacgaaatcatgtacttgatcataaaatttcttccaataacggtatttttgatactgcttttgccactcccgtgcttcctgcaagtaattaccaagaagtccattaatctgatcgatatgtttaatcacctgattagcatgatacaattgctcttccacctgcttttgagttaacgttgactcctgatcttcaaaaaatagaacattttcttgataatttttttcttcttgcaattgtttactattgtccatttcttctttgatagctgcaatttcgtctggctgtaatccaattccagttttagctttgactaataacgactgaatatctgccaattgcacaacatctatttccattttttgataacggttcgaatcagtcaatgtgaactcatcatctgttctacttacaaatacaaccacgtttctgattaattgatctatatttggcaagcgtctcaataaattaataatcactgggttgttgcttttttctaggacatatttaatactttctttatgcttggccacttgatcggctatctgatcataatcagcctgcacattatactgtccatttttacttgttcgtgctttggtttccaagcaaaaaatcccgctagtcgtaattatcacatgatcaatttggttactccctaaactattctttttttcatagggatatggtaacagtaaattatgaattatttctttccctgtctgcacttcacgtaaacgagaattcactaattcttctgcggcagcgcctgccaagagattgctaagatggcgcaaatcacgttgagataaaatattcataggtcgcaaatgttttatttgattcaaatgtagttcagtcattcttttctgaaatgcgtttactttttgattgtaaaccttatagccagaattaattgcccgaattcgtaaaacattttgcagagccaaagctcgtttcaaatcacgtttattattcaacaaagttttttcaactatcatagcatcatgaacagtttgtgaatcagttacttttttatgtgtaatccaagctttttgataactagcatgattttctaactcattcacatactgatttaagtcattttccaaaggcaaaattttgtttctaccttctttgactattgagccataatagcgcaaattttttgtaatttcgtctaactcattgaattcatgtttgccataatggtaagttaccttagtttctccattccaactagtcttacgccaataatgaccatccgtctcaccaaattcaactaattccgccactgaacgatctaaatagtacttaatcaaataatgacaatggcctttattgtcaaaaatgcgtcgcttaatataacccggtcgcattaattcaatgatctgaaaggtcaagttcttatgattaggaaaacggtatggtaatcttttgcctgcaattttttcaattttagttatttctttcttatctgttacagataattctatttttttcattttcttcttttttcgcttttgaaaaaaataataggttaataagcctattgttagtgtaattattgtaatatccatgttaattatccatattttggaacgtatgtttagacaacaataattataccatgattttgtataatgaaaaagccccttgttttaacaattcaaggggcttttatccttataatttgatattttccattccaatcattggatcaatttcaccagaatatattttttccgaggttagaacaaaatcttctgctacttctgctttatcggtttcattctccatttcttgagctttttcgtgctgcttgctttgatcagatttatccaatgattttgtaatacccaattgctgacaaatcttcgctgctaagccagtcttacgatcatttcccggcgtcttaaaagctgccacaaatgcccgtggatcaccaactaacactaagtttttctcagctcgcgttattgcagtatacaaaaggtttcgttttagcatcacaaaattctgcatggttagattcaagatcaccaatggaaattctgaaccttgtgatttatgaatagtgattgcataagcccgggtcagatcatttaaatcttttctagaaaaggcaacttctcttccatcaaaatctgcaatcatgcattccttggcatcatcttcatcaatgctaatgatcttaccaatttgtccattataaatatctttttcaggattattttgcaattgcagaatacgatcgccaattcggaaaacttcattatgtgcttctaataccttacttttaggctgagatgggtttaaaattgcctgaataacattattaagattagttacaccaccattgccaagatacatcgcgctaagcacttgaatatcatcttttgcaaatccacgttttaaagcaagtttaacaatttgtccaactgcatcccctactaattcgggacgacagctaataaaagaataattatttgttttcttaaacaatgcttgctgatctttaccctcattaacatcatgcgccaaagtaataatcgttgaatcatcaccctgtctatgaatctgcttcaaaatagtagttggaaacgcttgcgatttaatcaggtcactgaagacattgccagctccaaccgaaggtaactgatccttatcaccaacgaaaacaatatgccgcgtatcatgaatacttgccaaaagttgtttaaaaaggaacatgtcaaccatcgacatttcatcaacaattaagatttcaccatttaactcattcaagtcctgagtgttagtatcaccaatacctaaccccaacattcggtgaattgttttagcactgattccggtaatttcacccattcttttagctgcacgtccagtcggtgctgctagtaaaaacggaggatcttcactgtaaagagcggaggaaggaatctcagccagcttgcgtaatactaataaaattccattaatgatagtagttttacctgtacctggtccacctgtcaaaatagaaatcggttggttaactgcgtttttgatggccaacttctgtgtatcgtcgtagtgaatcttaagttccttttcagcatccttgattgcttgctctacctttttatcatcatattgttctctttttttatcttcttttttttctaccaagtttttcatcaagcgagcaatatcaacttctgtttgataaatattttgtagagcagcattctcaccatcaactattactttgccagcttcttgtaaactattaatacagctagcaattgggtcgaattgattgatttgaagcaatttacttgcttctgttaataactcagctaagcctacataagtatctccctcaccatttaaagcatcgagtaatacttgataaacagcacctttaattctacgtggatcatcactagcaatatctaattggcttcccatcatatccgcggttttaaatgcaaaacccgaaatatcattaactgctgcataaggatctttctctagttttgctaatgcttcaccatgataaagctggtaaacccgtcctgcaatacgcttattaatgccgtatttagccaattttaaaattacttctgaataagaatccatcgcatttagtcctgccaaaagactatccttttgctttctagttaaagaaagcttatcaatcttagctggactttccttcaatacatctaaggcatttagccctaattcatcaataatcgtagtcgcagcctttttaccaattccagggaacttattcgaactcaaatacttagttaaagatccctcttcatgtggcaatacttgcttatagttatttgctctaaactgcaagccaaatttttcatgcattactagtttaccctcgaagcgatagctactattaatttgaatatcgccaaaattccctgtcaccttaatatcgggacgagaataatcggataaagtgccgataatttcaacgtcaagaattttatacaagtctttactattttcaaaaacaatcccgttaaccttaccggtaaattcattcataatttttcttttccttgtcatttagcatcttcataattgaagcatactgattcattgcttgttgataatacttagcatccatctgcttagcttgagcaaaatatttttgagcctggtcacgatctttttctaatgtagtgacacctagtaaaaaataaactttcgcatttttcttattatcaggaattgccaaatacatttgctgagcctgttgattctcacccaaacttaaccaaatatcgcctagcaattcctgaattcgctcatcaatttttttgatcgtcaaagcataagctaaagctttttggccttgccctaattttaagtaagttagtgccttttgataaagagttaagtcatcattaggtatctgatctaataaagccagtgctttatcaaaatcgccttgcatgtaataacacactgccagattataatttaattcttgtggctctttaaccagatgctgggcctgctccaatagcttctgtgcttgatccaagcttccttgctcaattaaatacgtcgatagctgcaaataattagcaacttgttgtggatgctgatcgatttttttgattaaaagatgaatggcttgttctactttaccttcatcataaagttgcgctattttttgatccattataacgagtccgtcttcgataatttacgtcctaaataactagtttcattccacactaccggtttaaaagtctttccgccatctagtgtttctaagacagttaaagaggtattgctaaggccgccatttttgcgaatatctttcaatggatagcctaaaagtccacccataatagctgataatgccgcaccatgactaactgctagaatcttatcatcatcgtcaggaaatctttgtgccatttcttgagcaaatgcttttccacgagcaataacatgtggataatcctcaccatgaagttcagtcggatcatatttatctggatggtgccaaaaattatccatttgtttagggaattttttctctgcatccccaaacttcattccctccatatcgcccaaattaaactctctgagtcgttcatcgatcacaacaggtaagttagcgttcattgcatcatcgatgccctgagcggtattaaaggcccgatcaagcggactggcaaaaattcctctaaatttagttccttgcaagtgatgacctaatttttttatatcttctaagctttgtggcaaaagtggtgaatctccatgtcctccttggaagcgactagctaaattccactcagttttgccatgacgaacaaaataaatttgcattgcttaaatccccctaattgtctaatcaataagaatagtttagcacaaagaaaaaggcgttcgaaaaatcgaacgctctttttgcatattttttaaactaattgtaattgcttttcttcttggtaagcagcatcaatattaccgccacctaaacattcttcacccttgtataaaacaagtgcttgacctggtgtaactgcacgagctggctcatcaaagtaaacatcagcagtattgtctgcggcatgatacttaacagtcacgccgatatcacattgacgataacggaactttgcagtacagtgcatctcaaaatcatgatctggcttaccagtaaagaatgacatatcacttgcattcaagcgactagcatatagaagtggactatcatagccctgctctacaattaattcattcttcttaagatccttgccgaccacgaaccatggatcagttgattccttagttgagcccaagcccaagccctgtctttgaccaatggtgtagtacattaaaccagcatgctcaccaactaccttaccatcaggagtgaccatcttacctgatttagctggtaagaattcacttaaaaactttctaaagtttctctcaccaataaagcagatacctgtagaatcttttttcttcgcggtagctaaaccattagccaaagcaatctctctaacttgtggcttagttaggttagctagagggaaaataaccttactaatctgctcttgactcaattggctcaaaaagtacgtctggtccttgttaccatccttaggacgcatcatatgagtaacaccattggtatccttaacagtcttagcatagtgccccattgcaatgtagtcagcatccaagtccatcgcaaactccaagaacgacttgaacttaatctgactattgcacattacatcaggattaggggttcttcccttcttgtattcatccaagaaatattcaaaaacgcggtgccaatactctttttcaaaattaattgaataatatggaataccaatcttatcggcaaccttttttacatcttcatagtcttcagtagctgtacagacgcctgaatcatcggtatcatcccaattcttcataaagacaccaacaacatcgtagccttgttgtttaagtaaaagtgctgaaacagacgagtcaacgccaccactcatacctacaactactctagtcttgctattgtcaaccattattcaatcaatcctttacttcaagcaaaatcttacgctcctcaagatcctttaaaatataatctaaaagttctacagtaggagctaattgcttatttttaaaaatattaaccttctgcaaaccgttgcgatcagtaataaccatagttaaatgcgacaagtccttattaatggtcatctttaacttagtaggcgcgttataaggtgaatcattgtaaagaggatgttcataattaaaattacccttagctgtcttcacaaagccagcatcaatcaaagcataaagcttcaactcaagattcaaagtaaacttacgtttatcaccattaatcacaactgtatttgccataattttcctcacttatttataataagatactttctttttgaaagcaactatttatttttagattgaattctttgtacaatttttactaattcttgagcgaattgctcaatttcttcatccgtattataacgcccaaatgaaattcggatcgactcatttattcttggtgaattttctccaaaacaagcaattaaaacatgtgatggctccaaagaaccagcagtacatgctgaaccgcctgacacggcaaatccattcaaatcaagatttgtttgtaaagaagtagtagatacaccattgagatgcagattaagcacatgatgtgagtaacccggaccatacccaccattaatttcataattaatttgatgatcgtctaattcctttaaaataatgtcttgataatgagcatatttcttttgcaaagcatcacgaccaatctcggatacttcacggacagcttcgccaaagccggcaattcctggtacgttctctgttccagctcgacgtttggtttcctgctcaccgcctaaaatcaaatttggaatatcgatatccgcattttcatataaaaagcctaaaaacttaggtccattaattttatgtgcagaaacagacagaaaatcaatgttcatgtccttaacatcaattttaattgtgcccattccctgaacattgtcaacatgaaaatatgcattggagtcctttaccattgccccgatttctttgagcggcataatggtaccaacttcattgttaacggccataatcgatactaaaatagtgtctggcgttaattccttttttaactgttctaaagaaatttgcccgttttcatcgacattcaaatagacaatgttgtagccctcattttccaaacgtttcattggattaagaaccgagggatgttcgatcggcgtagtaataatctttttaccaatatttttacgagcataggcagttccaagaatcgctgtattattgctttctgaaccacctgaagtaaaaataatctctccatcttgagcattaatatcttgagcaatctggtgacgagctcgatcaattacatttctggccctacgacctaattcataggtactagaggcattaccaaaatcatttttcatttcatcggtaataatatcaattaccttgggtgacattggtgtcgttgccgcattatctaaataaatttcacgcacgtttaattcatcttttctacataatcactaattaacttagctgccttagcgccgacttccttgacaaacttgtcaaaatcattgtctgcattagcatccccattatcggaaattgcacgcatagcaaccaacggagttttaaaatgacgagcaacttgtgcaaaagcggctccttccatttctactcctaaagcttctggaaagtttttcttgattaactctttttgttcttctgattgaacaaaagtatctccagtaacaacaagcccttccttaaaatctacgtcttcttcacctaaatatttcttaaatgcttccctttcaggcgaattcaacttaaaggtagcaggctctcttggaatctgaccttctacatattcaccggcactaacacagtgagcatcgtgataggcaaaatcatttactaaaatcacatctttacgatgaacatcatcttgtaatgatccagcagaaccagtcataaaaattacatcaattttttctttagttagtaaactagtcagattcatagcggcattcactttaccgataccacttaaacctaaatatacatcattgccattaacagaaaaatgttcgaattctgttgatccgaacatttcttttgtttctgcatggaaatgatcacgataaaattcagcttcttccgccattgggacgataatcgcaatcttcaatttatttcctcatttccactataaatgaaatagtgctaatagcaccaatataattaaaacaatcactatcaggatagcacgattcaatctttttttcagtcttaaagacttctcttggcgaatcgtttccttatcactcgattgattatgctgataaaattcttgtccatccccagccagagggcgtcttctaggttcttcttcagagtcatcccgcttaaagtcaggatttacatctacttcttctgaatcattatcagaaaaggaagattttagcttattaagtaggctttttttctgccttttacgataatcagagcgtttttctaccataactaatccttattatcggtctgagcattacgcaacatcatattctcccaaacagtaattgcataaattgtctttgcatcaacaatttttccttcagccaataaagtttttaattcatctaagctataccaactagaagttaaaaattcatctgcatccagtgcccgcttatcagtcaatttagttaaggtatcacaatagaaaagatacatcttttcatcacaaaaaccaggagaagaatagaattcactgaccttttcccagtaatctgtgcgatagccaccttcttcattcagctcacgcttcattgcatcaagcggacttgcatcagtggaatcaaccaaaccagctggaatttccaaagtaatctgcttaattggttcccgccattgctttactaacaacatcttttgttcatcattaattgcaataacagccgatgcaggcttatgcttaataacttctctagttgcagtttcaccattaggaagcttaattgtacgaacagccagatccaaaatacgtccttgaaaaatctgctgtgacgagatttctgtttcctttaaatccaaaatcccagctcctttttaggctaaataaacatttacacattgcagaccatttttaccttgagctaactgatatttaactctttgacctacttgcaaagttttatagccttcctctttaattgctttatagaagacaaaatatgacttatgattacgatcatcttcaataaagccatagctactgccttcatcaaattgttttacagtacctaaccgcattagttttcaaatccttcttgaacagcttctgggtaatctgcttcaacgattttagcacaacgaccacaaagcattggcaactttggatctacgccaatatcagttctaatcatccgacaacgaggacatacttcgccttcagcatgttcaactactacactagcattattcaattgctttgcattatcaggtgcttcaccatcagcaatagttaacttagatacaattagaatttgtctgaaatcagcatccaagtcttggagcattgccttagtttccttatctgggtaaatagttactgttgcttcaaacgatttaccaattaacttcttatttcttgcatcttctagagccttcaagacgtcatcacgcaacttcatgaatttaccccaattttcaagcaaatcatcatggttagcatattcttcaacttctggcatattagcaagttgaacgtaatcttcaggttctttcaagaagccccagatttcttccatagtgtgtggcaaaattggtgttaagatcttagccaatttaacagcagcgtcgtaaataacagtttgcattgagcgacgatcatggctgttttcaccatcaatgtaaagtacatccttagcaaaatcaagataaaatgcagaaagatcattagaaacaaagttgaagaccttcttgaagacagtagtaaaatcaaacttgtcgtaagcagcaagacagtctttaactaagtcatttaatttcacttccatgtattgatcaactgaacgaagatcagcataagcaacgcgattttcttttggatcaaaatcactagtgttggccaacatgtaacggaaggtatttctgatcttacggtaactttctgcagactgctgcaaaattcccattgagactgcaacatcagaagtagtatcagcttgagctacccaaagacgaataatttcagcacccatcttcttaattacatcgtttggtgaaattacattgccaagtgacttagacatcttgtgtcccttatcatcaagcacaaagccttgtgataatacttctttataaggtgccttaccagttactgcaacagacgtaatcaaactcgaattgaaccaaccacggtattggtcactaccttcaagataaagatcagctggatagtgtaaaccatcacgtttttccattacgcctgaccaagatgaaccagagtcgaaccaaacatcaagaatatctttttctttagtaaactcgccatttggtgaatgttctgaagtaaagccttctggcaacagttccttagctgtatgagtgtaccaagcatttgaaccttctttttcaaagatcttggcaatatggtcaatcgtttctggagtaacaattggggtaccgtcttctgcatagaagatcggcaatggtacaccccaagcacgctgacgagaaattacccagtcgccacgatctttaatcatgttgtaaagacgagtcttcccccatgaaggaataaagttagcttgttcaatttgatccagaatttgatctctaaacttagaaattgaagcaaaccattgagtagttgctctgaagacaacgggcttcttagtacgccaatcatgtgggtatgagtgagtaaagaagcttaacttgagcaaagcgccagcctttttaagcttatctgctaccaccttgttagcatcatcatagaacattcctacaagatctggatctggaatatctttagtaaagcgaccttgtgcgtccattggactgaagaccgggataccatacttttgaccaacacggtagtcatcttcaccaaaaccagtagcgttgtgaactaagccggtaccgtcatcatcagtaacataggtgtcattcattaccaaaccatattggcctacaccagtcttaccataaaggggatgcttataagtcatcccatcaaaatcagtaccttttaattgtttaagtactttgtagtccttccagcctaagtcttctgcaatggctggcaaacgatctgaaccaattacatacttcttaccgtcaacttctactaaggagtagtcaaatcttggattaacggtaatacccacgttacttggaatagtccaaggagtagtagtccaaattactaatgaaacatctgaatctaagatacctttaccatctttaattggaaaagcaacataaattctaggtgatttaatatcatggtattctacttcagcttcagctaaagtggattcacttgaccatgaccagtaaactggcttcaagcccttataaatataaccttttttatacatttctccaaagacgcgaatttcttgtgcttcaaagtcatgttgcaaggtaatatatggattatcccaatctgccataacgcctagacgcttaaagtcggccatttgcttttgaacttgttcttcagcatattgtcgacaaagctcgcgatacttagcacgatccattgtcttacggtcaacgccttgcttagctaattgttgttcaactggaagaccatgagtatcccaacctggtacatatggtgcataataaccgttcatattcttgtagcgaacaatgatgtctttagaaatcttgttcaacgcatgtcccatatgaatattaccattagcaaatggagggccatcatgtaaatcaaaacgaggcttaccttcgtttaactttaatctttgttcatataacttgttatcttcccattctttttgccattcagcttcacgaacaggtagattaccgcgcatcttaaatttagttttacctaaattaagggtatctttgattctcattaacaaaattcctttctaaaaaagaaagcctcatcctaaaattaggacgaggctaaccgtggtaccacctaaattgaacttattataagttccacttaactttgcgtaacgtgcaaataccgtttagattaattaggcagctgatcagctcttaggctcttatgctagtcttccaccatcactagctcgctgaattgccttcaagctttactgtcaatctaatatgcttattttttatagtcgtcaggaaaaacaattgttgggcctaaaggatctgatttcatttcaggcttaacattaattgtttcatgacttggactgtccccggtcattggtttaggtgcagcattttcttcattatctgcatcgtcagaatcatccggttgatccaactccaaatcatcagggccttgagaagagtttacgtcattttcatcatcattgtcaacatcttcatcttcaacgtcttcatcatcagcacttactggctccgaaccatcatctggataataacgctctaagttgaagtaatcatccaatgcatgttgccacttttcatcattcaaattatcgatttcagtctgtagcatttcttgaatattactacgaaattcactaacttgctcttttacacgcatataatccgtagaaatagtatcttgttgatgcttttggaagttaatattatcttccgcttgctttttggcatccgcaataatctgcttagcctctgcttctgctttctctctaatttcatcagcagtttgttgtgccgaaattaatgatttatttaaagaacgctttttttcgttatattcattaacttgatcttgataatcatctactttttcttgtaaatcagttaactttttatttaaagaaactacttcattcttcaagtcaaccacttgatcaagtgtatcaccataatcatcaacaatctgatctaagaagctatctacttcaagacgatcatatccattacgaccacgccgtttaaattccttgttgtgaatatccatcggggtcaattgtgtttctttgtctgccaaagtctgagcaccaccttatatttaccttttcttgtagtcgaaacatcctcaatcaaaatccgaccaaagtgtcttaaactcaagacatcgtcttctttaatcattatattagaatctgctatttcatgccaatttaatttaaccagctgactattaatcatcttttgaatttgaccgcggctttgtctgctaatacccgataatacagcatcaattcgcattgaggcaactattttcgttttttcaatcgaatcatcctcaggaaccaaaacttctttgaagctaatcggtctcagctttacttttgctctgccaatgcggtcaatttgctcttcaaaaaattccgtcatttcttttttagtgaaaaactgccattttccttgattatcattaataatatcgccaaaaatacttgtatcaatacccgaattcgccaaggtgcctaaaataacactatgatttattttagtaaatttttgcggatattcaatttcatacggctgaatctgataatcactcggtcgcagattaagccattcttcacttaaataaactcgctttttctctgcattaggatagccaccatactcttgaacaaatgcatcattaccaacaattgttcttaaaattgctcgttttcccggatccaaaaaatcagtcaaaattggctcatgcttaaaaatcagctgattaaaaagaccagtaaaatagtcaattactggtctttcctcttgattaaaatgtgggtaaaacttacttgcctgtctgcgttccattacaccatcatcctcaataaaatatcaaatatccatcttaaaacatagttttgaatgaaatataagataaataaagcaataattggcgagacatcaattccagttgaataagctaatctcgcaaatggaccttttcgaaacaaatttaaatatggatttacaaccttgtctaaaaagcgaccaacaacagaattacttagcattggtagccaactcataattgcatcaatcacgatcagcagactataaagccataaaatccacgtcagtgccaagtagattaaatttaatatattaaccattagcttaaattgtctttcttatccactaaatcactaattttgccatcagtaacaaactttggtggagttgctaaaaagattttatcaccaatacgttggatttcaccatttaatgcatatacagtacccgtgatgaaatcaacaatccgacgtgctgaactgtcttccattctgctaaaattaatcactactgctttattatttaataaattttgtgcaacatccttagcatcggaatatacccgtggttcatataaaacaatcttgcttttagccgaattcaagcctgatttaattgaaaccacattatcgcgattaactgagttcagaggcaagtcttcattttcatttttagtctgtgaggcatattcttcgtcattttctaattcatcatcattagaaattccgaaaaatcttcctaatttatcaaaagccatttatactacctccaaaactagttttcactacgatgtttaaaaaatggaatatcactgttatcatcactatcgtcctgagcgctagtttcaatttgagaaatactatcctggtcttcatcactaaaagtatcaaaaccctcataatctttcttaggctcagtaggttgggtatttcttctttgattgtcttcgctatcatttagtccccaaacactggttggatcaaccatcgtttgcttaggctgctcaggttcttgtttttcggcagcaggctgaactgtttgtggtcgatcaactggttgcttaggttcttcagccttaggagcttcttctttttctttaactggttgagccttaatttgttggctacgacctggtaattgcttagaagcagcttcttcagccttagaatcaattccagtagcgattacagttactaccacctcatcgcccaagttaggattaattgaagtaccgaaaataatgtttacatcgtcaccagcagccttagaaacaatctctgaagcatcttgagcctcaaataatgtaaggtcaggtccaccagtaatgttaagtaacacttgcttagcaccatcaatagaaacttctaataatggtgaagaaatcgccagcttagtagcttcaactgttctattttcaccgctagcacggccaattcccattaaagctgcaccttgattttccattacagtcttcacatcagcaaagtccaagtttacgtagtcagttgaagtaatcaaatcagaaataccttgaacaccttgcttcaagacattatcagcttccttgaaggcatccatcataggagtcttcttgtcaaccatttcaagcaaacgattgttagctataataaccaaagtatcaacatattgctttagctgagtaataccttctgcagcgtttttagagcgcttagggccttcaaaactgaatggacgtgtaactacgcctacagttaatgcgcccgtctcacgcgcaatttttgccactacaggagccgcaccagtaccggtaccgccacccataccagcagtaataaagatcatatctgcacccttaagtgcatcttcaatcgtttgttcactctcttctgcagctttttgtcctacttcaggatgtgaaccagcacccaacccacgggtcaacttaggccctagttgaatcttgttttcagctttgttgctgttcaaagcctgaacatcagtgtttgctgcaataaaagaaacaccttgtacgccatcgtcaatcattcggttaacagcattgccgccggcaccaccaacaccaattactttgatgacagcattcttattgtcgtctgaatcgaatgtaaaatccattaaattaaccacctttaatcaaagaatttcttaaagaaactcttcaagctattagttttttcttgcttagtattattttcatcgtctggcacagattctgttctggcagacattttgcttctattataagcttctttagcttcactttcactattagaagtcgtacttttagaaatcttggtactttttggctgagaaacggggtcttccacagcgggttcaccaaaaccatagattacgccattaacaagatagtcaacttcagacatcttatatgaatagtggacgataccataagcagctgtataaatcggattacgcataccaatttgatctggttcataaattcgggccttaacatttaacccattagcagtcagactatcaattccttgtaataggctactaccacctgtaatcacaataccacctggttgcttcaatgcattatgcttaactaaaccttttcctaaacgagtcaaaatttgttctaagcgtgcattaataatttcactaagatatacttcgtcaaccatttgctgactatttgcaccaacactattaatagcaaatttatcgttttttgaggcaaattgtggatccgcaaatccatagtccaacttaatttgttcagcatcctttttcgaaatacttaaaacagcagagatatcattagtaatatcgcttccgccttctaaatcgatgttggcatacttaatttggccatctttaataacagttgccgtacttacgccaccaccaagatcgataattaccgaaccaaaagttttttcactttcattcaatgctacacttgaaattgctaaaggcgttggcacaaagaaattattatgataaccggctctttcaatagccttcttgatattgtgcaaaggactagtaggtgcagttaataaaattccactaacacccaaggaacgtgcaatcatttttcttggatcatcaacttcagttttaccatcaatcaaaaagcgactcggcaaaaatgtaattgcttcacgatcatccttagctgctgaatgaatcgcagatctaatcgttctttttacatcatcattatttacttcttgcccttgttcaccaacattagcaaaaccagttgcagtttccagttgtaacatccctaccggaattcctgtaactacactataaatcttggcgtttgttttttctgctacaccttttaatgcacgactaattgcactagcagtttgatcaatatctactatttgaccgtgtcgcattcctgaatttggcgttgtaactgcaccgataaccttaccagaatctgcaacaacggcttttacacttgtggttcctatatctaaacccactaaaagatttgaattctccaaaattaagcccccattaatatttgccttgaaaaaattctaacataaataaacttgcaaaacagctacgatatgccataagctttcttttcactagaagttaatggtctactaaatgcacctatttctaaatcaataaggctatgtttaccagctttaattctaatagtatcataatattttagtttgctattcaaagtagcagtattgccaatcactacattaccgtccttcattactaaaataatttgtgaatttcgtctggtattcccacttaataattttacctgatttttaaatgaattaggtaaactgttaaataactttaaatcattttttaactcatctgatttattatagccaacaaaaataggtttatcttggttcacttttgtccaaggtagagctctcgtacctatttttccattatccaaaatctttcggtaagaataaccatcttttaagtaacccacggttttacgttcattaatttgtaaaatcaattgattaatatgacctaaatgaacttgtgcactttgaatttctggatatttttgggataatctttgactcaaatctttttgttgaaacaagtaatcaaaaactttatcgctagccttgatcttggataccttaacaatttctttagcaggtaaatgctctgcaccaattattttaacagtactgatattcgctaaaggtgaaatatagtatcctaaaccagctatcgccaaaactgaaaccgtcattatcagacctagcctacgtcgtaatgatcgtcgtctttctgcctgtaaatttgagagtgaggcagaaatcttggtctgcgattttcgactattcctttgttggttaaattcatgattcaagtacggagacaattctttccttggatcaatcttagttactggctttttggccatctgcctcacctacctcctagcgtgaaatttcttccatcaccttaatcacttgatcagatgcatcaggtacgcctaaagccttagaagctttgctcatttcagtagcatacttttcatcgagcaaaatatggtcaattgaagagacaaaattatttggatttaaatcatcttctggaataaccaatgctgcaccagctttttctaaatcaagcgcattcttcatttgatgattatgagttacattagggcttggaatcaaaataacgggtacacctaatgcagtaaattctgcaatacttgttgcaccagatcttgaaacaacacaagtcatttctggcaatagacctggcatgtttttaatgtatggcaaaactttaatattattaccaatatcaacattcttaattttttcttgtaccttatcaaaataaaaagtacctgttgcccaaataatttgatatggtttttgctttagcgtcattaatgacttaagcataattctgttaattgctaatgctccacgggatccaccaaatactaaaacagttggcatttttggatttaatccccatgttttttcaagatcaattttttcttcgtgcaagcttaaaacttgttgtgaccgtggattacctgtcttaactagtttcttcttttctgagaattcctttgcagcatcatcaaatgtataacaaattttatccacataatgacccaaaaatttattagctaatccaaccactgaattagattcatgaatcattgttggaatatgcattttagctgcttcataaaccatagcaccgctaacgtaaccacctgtacctaaaatgacatctggtttaaagtcccgtaaaatttggcgtgcgcttttagtagcttgtaaaaatagcttgatagtctcaaagttttttaacggatgtttacggttaaagccttgaatcttaattgttttaaagttaacaccggctgctggaacaatttttgattccaatcctttttgtgtacctacaaataagatttcatcgtttttactaataccgcgttctttcaaacgttcaataattgccataattgggtaaatgtgaccgcctgtaccgccacctgtaaaaataactctcattttatttagtctttaattcctcaacaaatctaacaaagtaatcgccacgttcttcaaatgttctaaattgatcccaagaagcacatgctggtgagaacaatagtacatcgcctggttcaactaattcccaagcacgaggaacggcctcttgtagtgtattaacaattacaatgtccttaattcctgcttttctagctgcgtcagctaacaaatatctagtttcaccataaagaacaattgacttaacatgttttttaaataatggtaccaaatcatcaaaagtgaagccacggtctaacccaccagcaatcaatacttccggttgcttaaatgatggaatagctacagttgctgcttcaatattagttgacttagaatcattataaaccttgcagccatcaagtgttgttacatattgcaaacgatgcttagcgccagtaaaggtgctcaatactgcggcgatatcatcattatcagcgcccataattttagaaattgcaatagcgactaaactattttgcaaattatgaatacctggtaatttaatatcagaaatcttcataatcttttcgttttgactttcaagatattcatcgccaatgaaataatcagcattatgatctgtctcagaaaaagtttgcattttagctggtgaaacttctttttccttagccaaaatatctttttgatcataattagcaataaagtaatcattactgttttgcgttctagttacattcaactttgcattgacataattttcaaaagtcttgtgataatctaagtggacgttgttgtaaatatcaacgatcgctgcaactttaggatcaatatcagttacacccaaaagctggaaactagaaatttcaactactaaaatatcatccttagttgccttaggtacaacttcagaaatcggtacgccaatattaccaactgcataagcatgatgaccagatttttgcaaatgatggtccaaaattctttgtgtcagcattaccgtagtagtttttccatttgaaccagtcacacaaacatagggagcatcactacaacttaaggcaacttctggttcagtaataatcgggatattcaactcctcagctttttgaaccatcggattttcatagggaatacctggatttttaactaaataatcaaaatgttctttttcaagcaaatcaactggatgatgaccgccaattacgcgcacgccgcgacttttcaattcttgtgccttagcatttttctccaaatcagctttatcatttaaagttaaatttgctcctaattgcaaaaggagttcgctaacagcaaaaccacttttacccaagcctagaaccaaaatgtttttattattataagttttaatatccttcattttatgattatccccaaattactaaatacaaaatactgccaattaatccaactaaccagaagacaatatctactttccattctgaccaacccaacatttcaaagtggtgatggataggtgtcatcttaaaaatacgcttacccgtagtttggaaagaaattacttgtaaaattacactagcagtttcacaaacaaaaacaatcccaactaacaataatgaccagggacggttaagcataatactgattgttgctaaaccgccacctaaagcaagtgagccagcatcacccatgaaaattttagccggcttatggttaaaaataaagaaggcaattaaaccaccaattacactcatacaaaaggccaaaacagcaaaattcttttgtttgaatgcgatataggcatatgtaccatatgctacaactgataaacctgttgctaaaccatcaagaccatcggacaagttaacagcatttgaaaaaccaaccagccaaaaaataataaatgccacaaataaaactaagctatggacaaccccagcaaaaggaatatataacccaaattgaaaatgatcacttgtagcaatcaagacaattaaaattgcaattataatctgtaatgctaatttttgccatgcacgcaagcctaaattacgtttgaagtaaagcttaataccatcatcaaggaaaccgataataccgtagcctaagagactgattaccaaaatccaaacaactttattcaagctgtgctgcatagcagctacccaaataacagaaataactgctgcaattacaaaaacggtcccacccattgtaggtgtgccagactttttttgatgccatttaggaccttcatcacgaatttcttgtccttcgtgatgtgaccgcataaatttaatcaacaatggaataaagatcactgtcaaaaccagtgaactaactagggcaatacaacttgccaacatcatattcattctgagttactcctttaacttaatgtttaattttcttccagcttttaattctgttcctttagccacgctttgactcgcaacagtgccggtaccttttatgcttaacttaatatctgtcaaactagcaaattggtgtaaatcactataagtccatcccgtcatatcaggacaaatgatttttcctgaagtattgacaaaaatcttagacccagactctaacttttcgccactcttaactccttgattgctaatccgatcaccgctaccaattttaaccaaattaagtcctaattgcttagtttgactttcagcttgtgcaacggttttagcttttaagtttggtacttttacagtagttgatacatcatcatttttagcaatcgaaatgattctctgcatcatcggtttgaaaattgaagccaaaatcttttcagctccgcctccaattaagtgtggttgcttaattgtcaaataaatacagtaacgtggtttacttgctggataaataccaacaacagagaaaatataattactatcaccctttagataacctccacctttagggttagcaatctgcgcagtccccgtcttaacagcaatatcggcgtttcccatcttataagcagaaccagttcctgattgcttattaagtacctttctcatgttagccacaattacttttctggttttagcactatatactggagtaccaacttttttaatctgatagccttgaattgtattgccatcagagtcagtaattttattaaccaactgtggctttaccatttgaccattattagccaaagaactataagcttgcatcatttgcattacattcacagtaacgccttgaccaaaagcagtaattgcttggtcaactggtgttttaaacgaaatcatccccggctgctcacctggaagactgactcccgtcttttcaccaattctgaacttcctcaagtacttcttccaagtcttagcacccatcttttgttctaacttaacaaaaccagtgttacttgaacgttcaaaagcttgagaaaatggaattgtgccccaacctgaagtcagccagtcatggatagtcgaaccagcaatattaacagaaccagaccggtaatactcattagggttgtaattgccactgttgactactgcagcgaatgacaaaatcttgaaaactgatcctggttcataagtatcttggaccaagatatcccgatacgacttagttaatcccttcatagtttgaggattaaaagtagggcgttgagaagttgccaaaattttcccagtcttcatgtcttcaactgtagcagtaattgatgttggtcggtaagttttctgtacttcacttaagcgagtctcaagcaaactctgcaactgagaatctagtgttaaatacaagttgtttccatttttagcaggcttataaacctgattactatttggaagctgatattcagatgcatctaccgaagaaatccggtaaccatctgtcccagtcaaagtcttattgaaataggcttcaattcccatagttccgactaagttttgtgcattagtctttttattccaaattggttgagccaatccaacagtatgtgatgcaaaaacaccattgggatacaatctagatggtgtttccaagaacttaattcctggtaatttcattgcttcaatctttttcttttgccgcaatgtcagtccactaccacctgtcccaaattgtacctgaaagaccttctttttgggggttaaatattggtaaattttttccgcagacaatggtaaaacctgtgccagcttttcagctgtcttggttttattcactacatactcaggtttattcttatagttgatcgaagtcttatctaaaatcgcataaaccgtatacaaatgcgaatcttccgcaattgttaatccatttcgatcatagatagtccctcgcgtggccttaattacctgattgcgcttataaagctgcttggtacgctgtgataaattttgaccattaactgtcttggatattccgatatataaaaatctagccgtaaatacaagaaaaaccaaagccacggccatttggagaaatctccccaccgtaaagcggtagccgtgggctttggatttttgtaattttaaattactgttttttttcattaacgaatcgtcctaatatttttgttaattagagttaatcctttttcacgtgcaattttatttaaacgtgaagtagaggtcaactccccaatctcttgacgtaaatcggtaatcttattctgttccttagcaactgtttgttgagttctagtcaattcatgttgagccgaagttgcagaaatactagaagaaactagaaagatcatcatgcccaacgtaatgacgcttccaataatcatcaaagctttttctatgccactataaggaactttacgcggatcaaggataattcgttgtcgtctttgcgaaccatttctactacttggttcatattcaatttttcttgctgagctatcagccataacattttcctctttataacttctctgcaacccgtagttttgcactgtgtgagcggttgttgttctctaactcagaagtagaggctacaattggtttgtgatttaccaaacgtagcgttggcttcataccgtccggtataaatggcattcctcttggcacctcaacttctgaatacttcttaaaaatccttttaacgatcttgtcttcatgagactgaaacgtaattacactgattcgaccacctggacgcaatatcttaattgcttcctctagcgaagcttgtaaaacatcaagttcgtgattaacagcgacccgcaaagcttgaaaactcttctttgccgggtgccctccagtccttcgtgcatacgcaggaatcgcatctttaatcacatcaactaattcaaaagttgttgcaattggcttttcccgtcgtctttctacgattctgtgagcaatttgacgagaaaacttttcatcgccatattgatacaaaatatctgccagttctttttgacttaaagtattaactaactgataagcatctaagtcctgactttgatccatcctcatatctaatcgcgcatcataacgatatgaaaaaccgcgatctgcttgatcaaattgaggggaagatacacctaggtcatagtaaatgccatctattccatctgagtaacccagttttaccaggtccttttccagattactaaagttgtcatgtaccaattctaaccttggctcactatccagttgtaataaattcgcaaagttcaacttcgccgattttatcgcatattcatcttggtcaaaacctacaagcgtaccggtgtcaattttgctgagcaaatatttagcatgtccaccaccgccaaaagttgcatctacataaagaccaccgttttttggtttcaaattgtcgatagtttcgtgtaagagtacactggtgtgtttgaatttcatattttttatagttcaatgtcgtccaaattttcagcaatatcatcatagtcttcgttagcttcttcttcaaaactagtccaacgttcttttgaccaaatttcaattcgatcagagacaccaatgatgacacattctttaatgagtttggcatgcattttcaacgttgttgtcagattaacgcgaccttgcttatcaaactcacattccatcgcaccagagtagaataaacgcataaatttacgtgtattcctcttagtcaacggaagttttgctaatttagcttcaatcttcgaccactcctccatcgagtagccaaaaatgcagccttccattcctcgcgtgaatatcatcttgtcgccaatctgatcgcgaagtttcgctggtataatcaggcgacccttgctatcaagattgtggtgatattcacccatgaacatggtctagcccccttccactaaataatttaccacaattccccactctctaccacattcataagaaaaaaatacagatttttaaatttcttttttattgtgatttttcaaaataaaaaaaagtcacaaaatattgaaattttgcgacttaagcatatacaagtaattttattttataacactagcatcaataaaagtccgatataccagaaaacagtacaggcagtcaaataatcccataattttctaactgtttttcctaaagaaatatttttatttctaatcgcatcgttcagcgacacaacaatcactaatacaaaatagcataaaaaaccataaggtaaaaaagaaggtttattcatatgtaaagtaattaatccacaagctgaaagaaagaaaaatggcataacatcgtaccctctaaactgtgctttagggaaaattttattgataaaaaaagcaactactaagccaataattggaattaggaaaatataaagcataagtattcctccattctttttattctaaactataattgatttgaaaaaaaccgttaataagcataaaatattgttcaaataggagggctgtttatggcacgaaaaaagaaaaagaaatcaggttttcaaaaattaactattgcaatggcttggatcatggcaattattactttagcagctgttattgctcaagctgctatctcacttcaaagtttttaaggattaaaaagacgcgaaagaaaaaatcttccgcgtcttttttaaactcgataagcgtttaaatcaattaagaatggataatcctgagctaaattgccccaaatccaatacaagagaaaaaagaagacaactgcccaacctaaactgactaaaatgctcattaataatacgtgtgctgatgcagcactaatacccaccatattaaaaatgagccaactatacgcaacaaaaactgcagttcctaataaaacgacaattaatctagcccataacatttccggtaaaaaacgagctgttttttgacagatccagcaacttgcaggtaggaaaactgtataaacaccgataatgccataaaaatagatatcagcaacaattcctgcacctaatgctaaccaaatttcattatcattagtatcatcaaacagaccaatcaacattacactgattggcaaaatgacgcttaacgctgcaaagttgtcataagtcataaactgatgtaagtaaagtgcacatacaccgtctactaccaatgcaataaataagccaattgccaaaacccattttcgaaacgtagacattaattagccacctgtctttcaattacagttacaacagatggatcactaatatcacctgctggtttaattctaatctgatcagatagaccaaatgaatcacgagttgtcgtagtaactgtaccaattaacaagccttttggtgagttaccgcccataccactagtatatactctcgtgccggccttcagtttgcgaccatcaaccacctgtgtaaaggcaagataattattggaagtaactgtaataataccatgtactgtttttccattcgcagcatccgcttgaacagagaagcgattagccgactcatcagtagtagtaagtaattcaaccttggaagaagcagcatttgcttctacaattcgaccaataacaccgccatcgcacatgacagccatattctttttaattccagctgaacttcctttattaatcactaataaatctgaccatgtatcaggcgaccgagaaataacagaggcgttgaccatggtatagccacttaacgtatcttttaatttcaatgcagacttcaattgcctattttctttttcaagagctgaattgcgagccttcgtctggcctaaattagtaacttctcgctttagatgattgttttcttcttgcgtatttaaaatatcatgaacactatttaatccgcctgacacgagccctactggtacatcaacaattctagtacctaaagcaacgacatcgttacccaagctttgaatcagtaaaggtgtattgcgcctattgcgcaagctaacactcccacccaaaacggataaaataacaactactataataaatgctgataataactttttattttgcagaaattttttcattaagaattgatcctatagaaaaaccggcaacagccggcttttttattatttgcgacttctacgcattacttcaatattcttgagtgattcaccagtaccaattgctacacaatcaagtggatcttgagcaataaacacaggaaccttagttgcttcagaaataacttctggcaaattcttcaagagtgcaccaccaccggttaaaacaataccatgatcaataacatcggcagcaatttctggtgaagtttgttccaaagtctccttaatagctacgataatgtcttgaactacatcttgaatagccttggcaacatcaactgcttcaatatcaacagattttggtaaaccagttactaaatcacgaccacgaatattcattgattcaatttctttagccttttcaactgaagctgaaccaatttgaattttaatgtcttctgcagttctttcaccgattaataagttaaagtttgagtgaacatagttaacaatcgcattattaaacttatcaccggcttgacgaattgaagttgatgaaacgattccacctaatgaaattgtagcaacatcagtagtaccaccaccgatatcaacaaccattgaaccagtagggtccataactggaagaccagcaccgattgcagctgcaaatggttcttcaattacaaatgcttcacgagcacctgcaactctagctgcatcaattacggcacgcttttcaacttcagtaacacctgaaggaacacataccattactgaaggcttggaattaccaacagtcttttccataaaatatttaagcattgctgcagtagtatcgtaatcagcgattacaccgtccttcattggacgaatagctacaatgctgcctggtgttctaccaatcatttcttttgcttctgaaccaacggcgattacttcgcctgtttgtgtattctttgctactactgaaggttctctaagaacaatgcccttaccttccatataaacaagtgtattggctgtacctaaatcgataccaatattctttgtacctaatccaaacacaaaaatctctccttaactgttgcggtctctaaatcttgactaattatagcatactataactttaaaggcgcctttcacacaaattttaaagaactttaaaacaatttttctcacgcaaacttaaatattgaccttctcccacgataaaatggtctaagaaatcaattttcatcatttttgcagcttgacgtaaactttcagttaattccaagtcacttgcagatggcgttaatttaccactaggatgattatgagcaataaaaattccagagcagccataaataactgcccaccgaaaaatttcccgcggatgagcaattgatctattcaaagtcccttgaaatagttttttctcagcaataatgtggttgctattgtcaatatacaatgcccacaattcttcctgcttgtgtcctatcagcttatcagctaaatacgtacctacttcaatgctagatgtcaaaattgtctttctcttaggtgaagcgcagcgcaaacgatctagtactgcctcagccgtaatagcaagttcatccgagcattctgaactggtaataaactttaatagatcattaaacgaatttaaccctgtgtttttcagaaaaacatttaagtcctgcaacgtatgaattcctttattttctagttgttcaaataattgtgtcaatagctctaaatctgttttgacaaagtaatgatttggttttctttttaacataaaatccccctcattacttattacgcaaaaaagagctaaatttttttcagaaattcaaaaaagttttgacaaatcatcgttgcattctgcttatctttaacagatggtgctttcaaatctggtaccatcacacattttaaccctgcattagcagctgcttgaacaccggttgatgaatcttcaaaaactaaaatattttctttaggtaaattcattttcttagctgcttctagataaatatctggtgccggcttagccttaatgtgacctctttgtacatcaagataactaagatgaaaatcaaaataatttctgattccagtcacccacatagcatgctgaactacattttcataattacttgaagcaatcgccatcttcaagccacgcttttcaaattcgtctaatgcttcttgaacaccaggttgcagctttaactttccctcatcagtccattgccacaccaagtcatcagttcgcttaataaaacgatcacggtctgcttcagttttaaaatatttatgataaaaatcctgcatctctttaactgtagcaccagttaacttgagataagcatcccgcggcgtgcccaaattctcttcttctgccgcctgaatattagcatcccaatacagcttctctgaattaactagcaaaccgtccatatcaaagataatgccttgaatatcatcatctagcccttgtacgcgcatcacgttttcctttccaatttaaaatagcactaaccaaataaaaggatccactaacaattaaaatatcattagctcccaagtgatctcgcagctgggtaaaagcagctcgataatctttttcataattatatcttttttgtacatcaattggaaaatcatcttttttagctactcgcggataagataaagttgtcagtaaaacttcatctttatcatcaaacaagctaaacacctgctcaagatccttatctttcatcatagtcactaaagcataaagcttgccatgcttttgctgggtcatacgatgaacgactgccagcaaattactcattgcctgaatattatgtgctccatctaaaatgattagcggattttctcgtaaaatttgatagcgccctggaataatcgtttgattaatcgctgtttcaacttcttcatttgataaaggcagtttcaacaaaaagaacgcctggcaggcaacggcaatatcataggcttcaacttgtggtcgtaaagcaaaaactagctttcttttgtgatcttgataaacaatttgattatcaagcaaaacactaaagtctcgtcctaattgataaactatcgcatgttcttcttcggctttacttttcaaaattggccaaacaacttctggcacgttacctaaaactactggtctttttgccttaataatgccgcttttctcacgtgcaatatcctgaattgtaggtccaataattttttcatgatcgagaccaattgtagtaataacacttacttctggcataattacattagtcttgtcatgttctccaccaattcctacctcgataacagcataatcacactttttttgagcaaaatagacgaaagccagtgcgacttcatattcaaaggttactaacgaaaaagttgagtcctgctgctgcaatttctcataagtaccctgcacaatattagctgttttaactaaatcctgatcactaatattttgattatttaactgtattctctcattaaattcatagacatacggtgagacaaaaaggccagtcttttgaccagccttttttagtaggtttgataaatagtatgaagttgaacctttaccattagtgcccgtaatgtgaatcgttttaactagatcttgaggattgcctaattccaacaataaccgcttaataaaagacaaattatttttaggatgtaaatgaggcaaagcatataagtaatcgattacttcttgagctttagtaaatttcaattatttactctctttcaaatcttgaattctttcacgaacaccggctaattgactttcgtagtcagccttcttttccttttccttgttgacaacagcttctggagcgtgaccaacaaagcctttgttagccagcttcttttcacaacgagcaacttcgtcttcaagacgcttttcttctttttccatcttttctagctcatcgtcaacattaacaagttcagttaatggaacaaaaatttgtgcgcctggaattacagcagtcttagctaattttggtgcttcaacttcactagctacagtcaattcctttggatgtaagaagttttcaacgtaatcagcattttcgtccaaaacgcgcttgttagcttcatcgtctaattgaatcatgatgtcgatttgacttgacattggtgcattaacttccatgcggatgttacgtactgctttaatagtttcaattaagaaggccatgtcttgatctgcttgcttgttttcaaattccttgtgagtagttggatattcagcaaccataactgacttaccttcatgtggcattgaaagccataatttttcagttacaaatggcataattgggtgaagcaaacgcaagatttggtcaagaatccaaattaagttttcttgctttcttgcctttaattcttcatcgtcaccattcaaagcaaccttagaaatttcaatataccagtcacagaagtcattccaaataaagttgtaagcttcacgaccagcttcaccgaattgatattcatcaaacaagcgagttacttcactaacagtatgattcaagcgatcgaaaatccaacgatctgataaatcaaatttagaagcatctggcatatgagctggtttagcatctgctggcaagttcatgattacaaaacgacttgcattccaaatcttgttaatgaagttccaagcagcagataatttcttaggatcataacgagtatcttgaccaggagcagtaccattaagcaagaaccaacgaagggcgtcggcaccgtatttatcaactacatccattgggtcaacaccgttaccaagtgatttactcatcttgcgaccttgttcatcacgcattaaaccgtgtaaaacaacatcattaaatggacgcttgccagtaaagtgcaaactttggaacatcattcttgatacccagaagaagataatatcgtaaccagttaccaaggcattagttgggaagtagcgcttaaagtcttccgcattagtatcaggccaacctaaagttgaaaatggccataatgcacttgagaaccaagtgtcaagtacgtctggatcttgttcccagttttcaatgtccttaggtgtttcttcacctacataagtttcaccagttttcttattgtaccaagctggaattcggtgcccccaccacaattgacgtgaaatacaccagtcgtgaacatcttccatccagtgatcaagagtttgttcaaatcgttctggaacaaagtttactttgccatcagtcttttgattttccaaaactttgtcagcaagtggcttcatcttaacaaaccattgcttagaaagacgtggttcaacttgaacgccagaacgttctgagtgacctactgagtgaacaattggttctatcttaatcaagtaaccttcttctttaagatccttaactaaggcttcacggcattcaaaacgatccataccagcatacttgccagcttcttcgttcatcgtaccatcatcgttcataacattgattctttcaagattatgacggttaccgacttggaagtcgttagggtcgtgagctggagtaatcttaactaaaccagttccgaattctggatcaacgtgttggtcttcgataattggaatgtgacgaccaacaagtggcaagatcaattctttgccaacaatatccttgtagcgcttatcaccaggtgctaccgcaacggcagtatcaccaaacatcgtttcaggacgagtagtagcaatttctacataacctgaaccatctgcaaatggatacttaatatggtaaaaggcacccttatcatctttgtgaataacttcgatatcacttaaagcggtttgaagtgctggatcccagttgatgatgtattcaccacgataaattaagccttcattgtaaagctgaacaaaaacctttttaacagctttagaaagacccttgtctaaagtaaatctctctcttgaataatcaagtgaaagacccatcttagcccattgacctttgatgattgatgcgtattcatctttccaatcccaaacctgtttaacaaaagcttcacgtcccatttggtgacggtctttgccttgtttacgcaattttgcttcgaccttagcttgggtagcaataccagcatggtccataccaggaaggtaaagagtatcatagccttgcatccgcttaaaacgaattaaagtatcttgaattgcagtatcccaagcgtgacccaagtgcaacttaccagttacatttggtggtggaataacaattgaatatgggtgagcttttttgttacctgatggcttaaataaatcttcatcaagccaggtttgatatctacctttttcaacctcgtttgggttgtatttaggtgctaaatctgtcataaaattcctccaataaaaaagtcctagacatattgtctaggacgatcagttaaaccgcggtaccacctacgttaagcatgtatcaaacatgcttctcttgaagacgataacggcgtataccggattaacctactttttattttcaattaatcagctaatcaagctactagtcaaccttcggcctctcagctgtctggcttttctctgttaataaagtcgacccctcttgattcttgctttggttatgattatagcatgaacttcactcagaaaaaagggttaggaattagtcgtaattaagttagccatatgtctttattcttttaataaatcagcaatacatttttccgatgaatgatattgcttatattgttttaacacgttgattaaatcatcatagtgactattccaaaaataataattttcatcataagatttcacactcttaagatcgttataatactgcttaacaaaatcactaggcttcactttacttttatagttatttgtatatcgctgatagtcttgatgataaagaatgtctagaatttcaatctcaggtctagtacgaagttctactacttcggatactttctttttatacacttctggaagattaaacttttcggttttggaatcaagtatcctataaattttaacctttctacttctaaaccctttattcaaaaattctttagcaaactttttagcatttcgtgctctaattacttcaccttcaagaagatcatcctcgttgaattttagtgcatcgtgttccaatagaacttccataattgctcgttcagtatgaccttctacaataatagcgattagatctgtagagttactcatccattttaaccgccttttctgtagccttctttaaagccatgtaggcatcataatctggagctgtcccacctaaataatctgattcaaaaacatcggctttatttagatcgcttcttacatcagcagttgaatatctttgaagctgaatcttgccttctctcttagtaatatattcttcatcagttctttcaattttatccaaaatttcagtatagtgcgtactaaataccaaagtagctctatttatgttgattttaggattagtaaaatactcaataaaagaatctacaatagcgtgattaaagtgattctccaactcatcaataaagatgatgccaccaacggaaagtgcattaattacctcgccataaagagttatccctttagctgtaccagaagacaagtattttgcaatcgttgtaaaatcattttctgcaatctctgtatctttccctttaaacttcagcttaaacaattgtttagtagcaccagagccctcaggcttgttttcaattttaagatattcaattgttggatctaaaaagtttaaaatttctccaggcacattgccagaaccatacatcaatgcattaaagtcagtaaagaacaaagtatcaaatggtatttgaggataatacttatttttcgaaataatcgctctaaaaatcgaatcatcagacgacaaaattgaagaagctaggtcgcctaattcttttctgtctaattctggttttatatttttgaaatcaaataattttttctttgaaagattaacagttaccttttttcgatataccgtttcagactcaatatgccagcttttacttaaagttttctttaacttgaaaactaaactatccttataaactacatgatcagttccataaaaataagttgtaacactaataggctcatttcctattagcacatccgttagcttagtttgatcaattgacttttccatcacaactgtttgaagaattcctatcaagagtttcatgatcgtagtctttccagtagcattagtccctactagagtgattaaattattcacccataaactgccgagcaaatgagttaatcgatcagaggtattagaagtaacccttgcatcactgaccagtgaaaattcaagatcatcctcaaatagcggatgattttgaatttctaattttaaaaagtataatttatttttattcataattattcacctaaaattgttttattcaggctaaattttatcatatttttgcattttatacataaaatctgtttaaaatataaataatcctcatcaagtagttactacttcatgaggattatctaaaatattctactttctaatcatcttaactgcttgaatcaaaatcgttggaatcagagccaagccagcaagccacattacttcttgcccagttaacggagtaactgcaaacaagctatgtaacgccggtacaaacaaaatcaaggctaacaaaattgttccgacagcaaatgctgctaaactgtaccagttatttttgaaaccgatcttgaagatactgtgttgtgaacgacaattgaagccatgtaaaagccgagcaaatgtcaatgttgagaacgccatcgtcgttgcaactgcaggactatcttttagtccgatcaaaaaggcagcaattacactaatcgaaatcaacaaaccttgaatagtaatttgactcacaaaggctttgtccaaaataccagccttaggatcacgtggcttacgtttcaaaatatctggatcacctggctccattccaattgctaaagctggaagcgaatcagttaccaagttaataaagagcaattgaaccgctacaaatggtactggtaagccagcgagtgaagcaaataaaacagtgataattgctgaaaggttacctgataacaagtagccaatagcgtttttaatattttcataaactgttctaccgttagcaacagctttgataattgtggcaaaattatcatcggccaaaatcatgctggcagcatctttagatacttcagtaccagtaatccccatcgcgacaccaacatcggccttcttcaaggctggtgcatcgttaacaccgtcaccggtcattgatacgatacgatcttttctctgccatgcattaacaattctgatcttgttttcaggcgatacacgagcataaaccgaaatcttctcaatgttttgatcaagttcttcatcgctcaaagcatctaattcaaggccagttaaagccatgtcaccttcattgaaaataccaattttcttagcaattgcaacggcagtcaccttatggtcaccagtaatcatcacagtcctaatcccggcttccttagcacgagcaactgcagctacactttcttcacgtggtggatccatttctgaaacaaggccaataaaagttaagccatcttctgcttcagtagaaagctcttcatcactttctttataagcaaaagccaaaacacgcaaaccattttctgaaaagtaattgttttgtgccaaaatttctttacgatcttcttcagtcattggacgaatttcatcgccgaaacgaatattgacacagcgtttcaagagcacatcaattgcacctttaacaaaaatagttggtacagtatgaatcaaatgcttagtactcatcagcttacgatctgagtcaaatggtacttcttccagacgcttagaatgttcgcgtaattcttgttctgataagcctaaaacaccattacctaagtcaattccgggcacttgacgatacatttccagcaaggctgactcagtcggatcaccaattgccttatcttcggccaaacttgcatcgttgttaagcactacatcataaagcaagtagcggtgaagttgattactcaaatccagctcatttggctttaaaactttaccaccaatatagatgtcctcaacagtcatcttattttgagttaacgtaccagtcttatctgaacaaattactgatacagaccctaaagattctacggctgccaagtttttaataatagcattttctttagccattttttgcgtacccattgcttgcacaatagttacgatagaactcaaagcttcaggaattgcagcaacagctaaagctactgcaaatagcagtgaatcaagcagcggttgaccacgccacatttgaataccaaagatcacagcacacaagattaaaatagcagtagccaatcgtgatgaaaactggtcaagtgatacttgcagcggagtgcgacgttccttagtttcattcatcaaggaagcaatcttaccaatttcagtctgcatccccgttgccgttaccacaaccgtagcacgcccataagttactaaggaactggagtaaaccatgttaacccgatcagctagcggcacttctttttcaaaatcagtgtccaacttgtcaacattagtcgattcaccagttaatgaactttcgttgacttgcagagaataattttctaaaattcgaccatctgcagtaactaagtcacctgcttctaacaaaagaatgtcgccaggtaccaagtccttggcctcaatctccattttttggccattacgcaaaactttagccgttggcgcagataatgactttagcgattctagcgacttttccgccttaacatgttgtaccgtacccaaaatcgcattcagaatcaatacaacaataattaccaacgtactttccagactgcccgtaaaagcagaaattattgccgcgataattaggatgatcaccattaagtctttaaattgttctaaaaagacctgaaaagtaattttcttctttccttcaactaaagcatttggaccaacttgagctaatttctcttgagcctctttagcgctcagcccctgctttaaatcggtatttaactctttagctatctcgtcttttttctgacgatagtattccatgtaaagccctccctaaacataagagtaatttaagcaaaaaaatagagactactggctaaaacactgtttagtcaatagtctcatcatttaaacttacagcggaaaataaatttcgttctgacgccgtaaatacaatttatgccgattactccctatttacttgtacataattaaaccatatcaagtaggtagttggcaagctattttaactttcttttaggaagttttctaattgttcatcggtaaaatcagaaccgtaattttgttcaaggagatgcatgatctcttgcttggtattaccagttcttttaagtgaagaaactaaaattttgacgcctcgtttaagtccctcttctttaccttcctcacgtgcgtcttgttctcgctccagtattttctcttcgtagtccatgatataatcactccattccgagcaataagataatcatttgtacttcttatctttcaataatccgttagcaatatcagccgaactaactggtacaccgactaaacgctcattttgccacaaatcaaaaaaatcagctggcatcatttgatcaaattcatcatctgaattcattaaatccttataaacacgtgacttctcaaataaatttagagcctgcttaggataaatgtttaatctcttagcaattaagtcgctaattgcttcagctagttgctgatgaaattgcttttcactaatttcgggaatcatctaaccaactccttatctatgaacgttaaagctttgagagctctttctgtcttgaaacaatactgctccgaataaacactcggttttaattttagcagagcctcatctaaatctagattaccatgtttccagcaattaacaacagaaaaaagtttaccatctgctgttgggccaatgacgatatcagaattatcttttatattattcattctattttgaatgacaaacttaatccaatcaatatctgcttggtaaactaatattttcaagtcgggttgatcagcatcgaatacatatctatttaatgtcggttgacctgaatatctagccttacgctttgcccatttttctgcttgtctacgattagcagtcacataaaagccattaccaaaatcagttgtaaaaacatttttatttatacgaggctgataaacagcctgattgcttccatgatacaaaatgactttggtattgcttttcatgaatcgtgatgtatgcgtatttttcatcgcgcacctctttcataaatagtaggacaaaattatcctccactatttattacgcaaaaaagcacgatttttttgtgagaaattaaaataaaaaaagaaaatgcctgagaattatatcccagacattcaccaatttacggctctttctcatttctcttccttcacaatataaattggtcgttctttaacttgtaaatagattttaccaatataacggccaataattccgatacacaaaagctgcaaaccgccaatcaataaaataattgaaattgtgctggcccagcccaaaatacttgaaccaggaactattagtttacgaacaattacaaaaataagaccaataattgacaaaatgaatgaagttgtcccaatccaaacagctaagttaagcggtgcttgagaaaaatcagcaatcccgctcaacgcatatttgaataatttgtgagtcgtccaatcagtttcaccagctacgcgctcgacattgtggtactcaagatacttagtcttaaaaccaacccaagcaaaaatacctttagaaaagcggctgtattctttcattgataaaactgcgttaaccatctgcctggtcatcatgcgatagtcgcgtacgcctgaaacaatttccactttagaaatgcgattaatcaccttataaaattgattgctcaagaaagacttaaacttaccttcccctttacgatctactcgtctgcagccaactgcatcatagtcaccagtctgcaaaattttatacatttttggtaaaagtgaaggcggatcttgcaaatctacatccattaagacaatataatctcccgttgcagctgataggcccgcatagatagcggattccttaccaaagttacgagaaaaagaaatatagtgaacatgtttgtcctgctcatgcaattttttcaattcggtcagtgtgttatcattggagccatcatctacaaaccaatattcgggcgtcactttgggcattttagctaatactttttgcactgctggataaaaaagtggaattgtttcttgttcattaaaacaaggaaccacaattgataatttttccattagatttcttctttcttagcttttctaaaagtaactactttattaattacaaattgaattaaagttgctacaaaagttgctactattttaacgattaagtgcggataacccaatttagtaacgaaaataaatagggaaaccgtagtaaataccgtggtaatctgaccaacgataaaataagaaataaatcttaatatcatgcgatcatgaactttaaagttagtataagaattccataaaaagttattgatgatcccgcaggtagacgaaataatgttagctatttcaacattcatcttgaaatgcgtcaaaattgtataaattccaaaatcaacgactagccctaatacgccaattagaacatactttactaattgaacaaaatcttctgaatagattgctgttttgattttttccataattattcctaataaaaaatccagacaagaggtcctggatttcaacatatttaactaatatggtcttaattatatcattgtttttaagctctacgttttcattattaaagttaaaactttaataggaacaccttttgcattaattataatttttgtcattcaatctatctgtcttgttagtatcctcatacaaatgataggaactcttaatcttatgcctgccttgtggatcaaacatgcagagaaagataacatagcaacactttaaatttcgatatgtgctgcatttcaaaatcatacagatttccatcaacatcctcaaccaaaatatcgagaataacagctttttgcttagggtgtttgggatcagcgacctttctctgcttctgcagataatgaatatctctaatctcaatctccggcaccagtccctgtaggacatgcttgcaaaaattcttgttagacataatctcaccaaagattacatcctctgtgaagccaaaccagggcttctttttcttgtgcgtattttccattgcgcacctctttcataaatagtaggacagaattatcttccactatttattacgcaaaaaagtgcaatttttttgtgagaaattgaagttttttaaagttttacccaactatatcttccaacttcaattccagatattctccccgctttaagttagcaggcaagcttaactttcccatcgaaattcgctctagctcaacgactttcatccctaccgcaccaaacatacgcttgatctggtgatatttaccttcacaaattttaatttcagttgtagacctatcgtgctcttcatcctgggataatatcttcaattctgctggctgcagtttggtcccatcgcctagtgtcattcctgaagcaaaagttttaacagttgcatcattagctacaccagcaatttcagcacgataaactttatcaacatgcttaccaggtgcaagcaattcatgattcaactgaccatcattcgtcaaaaggagcaagccagtagtatccttgtccaaacggccaactggcacgattccttgataacggtcctgcggtgcaagcaaggaaatcaccgttggctgattgcgatcttccgtcgctgacaaaacacctttaggtttattcaataagaaataatgatatttttgataagcaacagcatctccgttaacggtaacctgatcgctttctttaacttgctgctttggcgttttaacaatcacatcattaaccgcaacaattccttttttaattaattggtgtacttcttttcgtgagccaacattcatattggccaaatatttatctatgcgcattatgtctttctttcgttcttatgtgttgattaatattaattatataagaaagttaacccaatttcgaattgcgacactaatcaaaaacggtcgattttgttttcgaccgtttttacgcgcgttttgcgcgcgattatttgcttaaaatatattttgtagctctgccttcacccattcttctaatataaccttgtttttctagttgccgcaaaatcttcaaaactttcgtcctaccaaacttactcatttggctaatttgcttcgtagtatccgcaccttcatgaattatttgatatactttcttttcatcattagacagatcgtccgtaataaattttaaaactggcaatattatctttatcgaattatcaaaaatttcaaactgcggttgaaccaaactacttctataagaatcatttattcttcttacacctgtaccaaattgctcaattaatcctaacctaaagaaaacattagcaataattggattacgcaaaatggaaatctgacctgaaagatattcttctttgctaagtccttgtggcaatccacctggagatactacttcaattctgtcatcatacatagaaattttaatttgcgaattaatgttccaaactcgatgaactaaggcattggctattgcctcacgaaaagcttcttctggaatctgacttacaatatttcgcgttgctccctgtatttcttcatgttgataatattgacgatatttttgaattgcttgcttatactctttaagaatagattcatgctcataacttgctcgatcaagcataatattaatgctttcatcaaaccgaacaatatcaattccacgataattatttttgtctgccaaaagctcaccggcattagtgtaactagtatccttacgctctaaattaagcgtaatcaatatatcagatgttaaacttttaattcctatcttttcttttaatgcttcttctaaaatgttaaatgacaaattttggttcatcgcggttaaactatcataggttctattttcaccaattaagattaactgtgataattcagatcggtccacttcgatcgaagcactgtcattactcttataggcctttgatttgtataaatatggaggattaactccttgctttactgttaaagtaaccacattagttttaggatcaatttctaaattataatctggatttggtttgatcgaatcgttgattttattttcaacatttaaacaaaattcaactggatttttcacaccaacgattgatccatcatcctttattccaaatttaattttgccactgccataatttgcaaatgcactaaccgtttttagaaaagtattcgtcaatttctctttaaattctaaatttttggtttctctcatttaggtcaccgtttctaaactatttagttataattatactctttcacgcgcaaaaaaacggtcgaaaacgaaatcgaccgtttttacgcgcgttttgcgcgtgcctattatattaactttaaatcaatacataatactactagaagtttccatattaacaccatatctttctaaataattaaactgtatcatattaaatttcaaaaacaccagtgaaattaatcctctataacaagtcagcgtcttcttgagctttatcatccaagaatttttcatttggataaattggcgtaatctcaataccagccattgccctttcaatcaggccttcaacgtcaagacgagcttcatattcacgcgctttttccaactttggcttagtcttaggacgcggtggagcaaaaattgtacaacaatcttcaaaaggttgaattgataaatcaaaggtaccaatctcttcagctttggcaataatctccgttttatccattgttgcaactgggcgaataaccggagtagtagttacatcattgatagccaccattgattgcaaagtttgagaagcaacttgaccaactgactcaccattaaagatagccaagccgccacgttgtgcacgaatgcggtcagcaagctgcaacataaaacgacgttgcacagtcatcaaatagccttctggcagtttttccttgatcgtttcttgaatttcagcaaacggtacggcaataaaattaatcttaccagcgtagtttgccaaaataccagtcaattccttagccttagccaatgccttttcagtagtgtaaggtggactaaagaagtgaaccatttcaatatctactccgcgcttcaatgccagccatgaagcaactggggaatcaatcccaccactaagcatcatcacagccttaccagcagtaccaacgggcatcccgccaacaccatggagcaactgattagaaatataaacggcatcttgacgaacttcgattctcaagaccaaatcaggatgcttcatttcagccttcaagccatccatatgatcaaacaagtagtcaccaactagattattcaattgattagtgtcgtattcaaacttgtggtcactacgcttggtattaaccttaaaagtcattcctggcttaaaagtctcttgcatcaattccaaagaagtcttttcaatatcttcaagagtcttaggaatcttaattgctggtgagtaagtttgaattccaaataccttcttcagacgttggtcaacatccttgaatgatgcgccattcaggacaatgtgcatccgatcatgacgaggatgaaattcaatttgtgggaaatccttaagaactttttcaacgttacttgctaagcgattgatgaagtcctttctgttcttccccttagttgaaagctcgccatagcgaaccataacttctgtgtattccattaattttctcccaaatgattaattttagcaaaatgattatagatcttgtcaaagaccttaataaattcatccgcttcttgaagcgtattcgtctcatcaaaacttaaacgaattgcactagtagcaatcttatcatcaattcgcatagaaaccaaggtgctagcctcatctgccgtctttgatgcacaagcagaagtagttgaagtataaatatcttgatcttctagcgtatgaaccaaagtttcgccccgaattccctctaaagcaaagcaaagaatatgtggtgcaaagccatcgcttactggtgaaaaaatattaatccctggtttatcttttagataatcaacaattttagccttaatttctgcttcacgcttggccttttctggttcatcttctaaaagcaaacgaattgccttagccattcccgcaattgcaggcaagttctcagtacctgaacgcaagcccttttcttgaccaccaccatcgtgtaatggggtcagcatcttgccttcttttttatataaaatacctataccacgtggtgcatggaacttatgcgcagataagctcgagaggtctactcttggtgtaaaaaccttatcccaaatatttttgccaagtgcctgaacgttatcaacatggaactgaatcgttggataattttcaagcaaatcgctaatctcatcaattggttgaatggtgccaatttcgttattaacgcccatgattgaaaccaaagttgtatcagaatcaatcgcgtttcttaagtcattaacgataactcggccttccttatcaactggcaatctggtaacgcgccaacccaaattctctaacgcgttaaaactattggctacagatgcatgttccacgctagaagtgataatatgcttaccaaattcacgcttttgaattgcagtccccttaattgcggcattatttgattctgttccaccagaagtgaagaaaatttcatgctgcttagtccccagcaaatcagcaatttgtttacgtgacgcctcaagcaattggtgtgcacgatcacccatcttatgcaaactcgaaggattgccccaaatattagtcgctactttattgtaagtatccaatacttgtggatctatcttcgttgttgcactattatcaaaataaatcactatcattaccccttcatttaaaaaacggtcaatcgcttgaccgtttcaagacttttcaattttagcttaaataatgaatcgcttcaattaattactcttctcttctgaataatatgcattttcaagtcgttgataactacctggctctaccttttcaattgctgtagcaattgtatcaagggcttccttatagttatattcattatatagctgcattgctgtcttttgtgcttgcgcaattgaatccttatctgcatatttatttgaatactgcatcgtcaattcaactaggttagcggaattaatgatgtcatctgcttcacgtttaagccgctccacatcatcagaaatttgaattaattcagctgagatcttttccatattaatccggacctgacttaattcgttgctgacatgaccaatctcgttgactaccaaagtgtacatttggacaaagctatcaggattgccaggcaaatttcgtctttcaagtcgacgataaactaatgaaacttcttgcttaaagcgcttgattgaatcattagctacattttcagaatcataaagtccatcaacgtcagttgacatcttagcctgctctgcatcaatttcacgcaggcgatctagcatctggagccatgaatcttgaatagcagagtaaacacccttaccatctgcgatattctgtgtatcaatagtgtactgatggtacatttcattgacttctttttctaagtctttactcttttccaattcgccatgagtcaattcatagctctcatcaatatgccgcaacttttctaccagtttctttgacgcggtttgctgatgtgagatcaaagtcagcattttactttgatttttttcaacaaatggtcttgccttgtattccttagctaaaacatcatacaggtcgtcaatttcgccagagatctttttattttccttggctaattcatccaccttagtctcagctagcaatttgcgcgcaccatcaatttcatcatgaatttccttgattctgcccaaaacatctacgctagtaaggtaatatttttctgaaatcatttttttataagcatcagacaattccttaagctgatcttggaacactacttcaagctgatgataaccctcttttagcggttttaagcgtttttgtaagttacccaaagacatccgaatcttggacaaaactcgcttagcttcaacatgatcaccttgtgaagaaagattttttgcttcttcaaagtcactctccattgatgctagttgatcttcaacctgatcaatcgcagcaccatattcaaaggaattggctaagatatcttttcttaattcacgataaactttaatcaaagcatcatattgaatttgattttccttatttgattcaagtagttccgtgaaaactgccttggtgttacgagcatcttcgagcgttggcttgataatctcctgtgcttgtttaatattctttcttgctttaaacaagcgataagttgcattttcattagcagcttcttcaactagcttatgcactcgcggtaattttttcttagctgcttcagtgtagctcttgcgccaagtatttaatgtagttaaactttcgccggccaaatccattttatccagtcgcgtaatatcatcttctagatgcatcttctcaatttcagtcactgctgcatcaatcgcttcaatttcttttagttgtttacgattgatcattagcattgctgcaactacgacaatgattaggatcaccacggcaataattataatagcttgaattgatgacatagtttatcctccaaaactatcataattataacaaaacctgaccctaataggtgcaaaaagctgttctattttcttgatttattattctgaactctatataatactattcgtgtaaaatatttgcagcaataagtgacaagaacgtcaacatcttgaaacgctttagtgaacgagtaacccgcgctgcattgggcgaaaatgtaaatccaagatgcacgaatgttgaacttatgcttaatattttactccaaaaattattgtttaaattttatggaggattttttatgtcaagatatacaggtccaagttggaaacgttcaagaagattgggtatttccctttcaggtactggtaaggaaatttctcgtcgtaactacgctccaggtcaacacggtcctaacaaccgcggtcgtttgtcagaatacggtcaacaattgcacgaaaagcaaaagttacgttggatgtacggcttaaacgaacgtcaatttagaactttgttcacccgcgctggtaagattcgtgaaggtcaacacggtgttaacttcatgattttacttgaacgtcgtttggacagtcttgtttaccgtcttggtttagctactactagagaacaagctagacaattggtaaaccacggtcacattactgttgatggcaagcgtgttgacattccttcatacgaagtcaaggttggtcaaactattggcttgaaggaaaagtcaaagaacttacaacaagttaaggatgccttagaagcagttactgctcgtccatcatttgtttcatttgatgaaaacaaaatggaaggtactcttgtacgtttaccagaacgtgacgaaatggaaccagaaattgatgaagccttagttgttgaatggtacaacaagttactttaatttttacattttattttgtcgaaagtctttctcaatcgagaaaggcttttttctttgctacaataagtacataaaaagaaaggatgattagatgactgaagatttaaataaacgtgttgaacaagcagctcaaggtattactccacaaactaagcctgatgaacgccgcagatttttaggttcattacgtgagcgctgcttaatccgtatggacaatactgaagttaaaaatcctgaattaactgccctatttcttaaacatatcactgactttaagggctatactattttgatcaatggcaatatcactgatgatggcttcttgggagacattgaagccagttgcagcaaatatgatattcccttcactttagttaacaatgaaaccgcaaaaacaggaccacatgatacggcagtactagttgtagcgaaaaacgctatcaatcgaccacgaattgagctaaagcaagtttatccacctgagtttcctaaagaagaattagccgcacctaaaacaaaagaaagtttttggcataaactttttcacggagataagtaaatgaaaccattagcatatcgtatgcgaccaactaatttagacgaagttgttggtcaaaggcatctgattggtccaggcaaaattattcgccgaatggtggaagctagacttctgtcttcaatgatcctttacggccctcctggcatcggtaagacaagtattgctagtgctattgcaggctcaactaaatatgcctttagaaagctcaatgcagctactgacggcaaaaagcaattgcaacaagtagccgaagaaggcaaaatgagtgggacagttgtcttattgctggacgaaattcatcgtttggacaaaactaagcaggacttcttactgcctttgctagaatcgggacaaatcattttaattggggcaactactgagaacccttatatttcgatctcccctgctattcgttcacgttgccaaatttttgaattaaagcctctttctacagatgatgcttctcatgcaatcgatcgcgcattgaacgataaagaaaaaggtctaggcaaatataatgttgaattaacagatgatgcgcgtgctcttttgattgaaaaaggcaacggtgatttgcggtctactttgaatagtttagaattagctgttctttcaactaagcaagaattgcaagataaacaccaagatgatcaaaaaattatcatcactcaaaaagaaatggctgattcaattcaaatgaaggtgcaaaactttgatgcttctggtgatggacattacgatctagtctcagcatttcaaaaatcaattcgtggctctgatacagatgcagcgctgcactatcttgcccgattaattgaatctggtgacttagtctctatctgtcgaagactagcagtaattgcctacgaagatattggactagccgatccagacgcagctgaacacgctatagtagccatccaagctgcacaaatggttggcttgcctgaagcacgaattccactggctaatgcggttattgagttagctctttctgccaaaagcaatagtgccatttcagcaattgatgctgcactagctgatattcgaaccaaaaaagttgactcaattcccgccaacctaaaagatgctcattactctggtgccaaaaagcttggacatggcgtgaactacctttatcctcatgattatcaaaatgattgggtagcacaacaatacttgcctaataacctgcttcatgccagctactttgcacctaaaggcaattctaaaatcgaagctagatataaggcaacctatcaaaaattaaaacaaatgcagtctgataacttgcgcaataatcactaatctcgcgcattcaatatggttgacaagcacctgtaatatgcgtattataataagtgatctgagttgatcgacaagcttaaatgtataaagttgaccgatcaaactataagacgtgggagttggcaaataactaccgaatcggaatactgccttgttgcaggatccatattcgctgcgatgccagctaaaattttgaacattgcgggttcaacaagcgtcattatgctatgtttagtcaactcggatttctttagaatattaaaaaaggcggtctcaattgaccgtctttttctatagtggagactgttaaatggcaataaagattgtaatgattatttttatccttctcctactgttaacctcgtggtacatgtggcacagaaggaacggacattttttaatttatgacattggtggcgatccacgcttgagcaatattcttaagtggacttcagtcgcccttttagctgaaagtattttagggattattttgctattcatgggtaataaatatttaaatctaatcaccttattcttagcttcattaactattttggcttttggtttatcaattactcaaaataaagaataataattcactaatgacaagcaaaattttggtaaaatagaatatagaaagaggtgcttatatatgctttcacaatacaagaatattcaagttgcagttgatggttcaaaagaagctgacttggccttcagcaaggctgtagccatcgccaagcgtaaccatgcaacactagaaatcttacacgtaattgatactcgttctttccaaaatgtttcaagttttgattcagcaatggtagaacaagtttctaaagatgctgaaaagagaatgaaggattaccaagctcgtgccactaaggctggcgctgaagatgttcactactctattgaatttggttcacctaagacaatcattggacatgacttccctaagaagcacaatattgatttaatcgttgtgggtgctactggtttgaacgctgttgaacgtctgctcatcggtagtgttaccgaatacgtaaccagaacttctaaatgtgatatcttggtatgtcgtactgaagaagttaaggatgctttgcaaggctaattatttagctttaataaccgataaaaaaatacctccaaaattcagatttgaatttttggaggatttttttaatgttatttctaaaaatcgccagccgtactgaacatgtaatcacgattatggaacttcatcgacaagattaatccaatcccaatcatgtttcccatcagagctgaaccaccctgagaaacaaatggcaatggaatacctgtcaatggcaataaatcaatattcatcccaatattttcaaatacgtggaacaagatcatcatgataacaccagttgcaatgtatgaataaaagacatttctggtatcgaacgagatttttaccatttgaataatcaggtataaataaatcaaaatcaatgctacacagccgacaaaaccaaagttttcaccaattaccgagaaaaccatgtctgatccacgaactggaacataaacgctagctttgccaaaaccattaccaaatagttgaccagaaccaatggctttcatactttgccataactgataagctcctgatgaagtatcaccagatggatcgagccaagacttaattcgttcaaattgatatgcttgaaagaaatgactcaacaatgattgcccagccgacgtagttactaatacaataaccccaatagctgctaaaatcaaaataccatataacggtacaataattttccaagaaatccctgatactaaaaccacgccaccaacgatggcaataaatactaacatagtaccaaagtcattctgtaactttagtaaaattgctaccggtgccagccaagcaataattttgcctaataacaaccaatcggtcttaatcgtgtgaccatatttatcattatgctctttgaccactcgagccaacatcaagataaaagctggcttcataatttctgaaggctgaaaagtaatcggccctagtttgaaccaacttttcgcacctgtatctgcagctacgcttctgttatataagaatagcaccgcaatcagcaaaaatattccgattccaaagaaaattggcgcaatcttagacaactgttctgcatcaaactgcatcacaaccataataattgcaattgaaatcaagtaccataatgcctgcataactactgccctaacaggtgaaccaatatgactaggatcacctaatgcagcaacatagatacaatacaagctaattaaagccaagagtagcactggtataataatattccaggctaatcgatcgaatagacttgtttcattttcaacttttgccattaaataatcactacttatattttatttttcatgtaaggtaaagtatgaaagtaagtcattaatgctgctttcaagactgttagcaaacaaaatattgcttgtcttagaagtagtagcacgataacgcccctctaccttttcaattaaaccaatggactttctattaggaataacaacttcccacgttggcaaattctttcccttaagttcattaacttcaatatcaatattctctaattttttagacataaatcctcctacttgctatccggatgaaattttgaagcaataattggatcttcatatctctccggatgtggatttcgaaaaatagtaaaattatcaggaactggatccactccacccttgataaatgggttacaccttagtatacgacaaattcccataatcagccccaaaataggaccatgttttttcaatgcatcaatcatgtaattggagcatgttggataataccgacaacttggtggtagtaaaggtgaaatcactgtctgataaatacgtacaataaaaatcaaaatcttacgcaagtaatctcctcacttagtgtcgttgatgcttttcaatatttttaagcaaagtacctgttcctaaagcaactgcttctaatggatgatcagcaattaaaactggaacttgcaaataataagaaatcaacttatcaatattctttaatagggctccaccacctgttagcatgattccgcgatcaataatatctgctgaaagctctggtggagttgtttccaatacttctttagctgctgcaatgattgacatcaagcctggttctaaagccttttgaatctctggtgcagtaactgtagtctgcttaggcaaaccatcaactacgtcacgaccacgaacagtaatttgttcatcttggtctggttcaaaggcgctaccaatttcaatcttaatttgttcagcagttctagaaccgattaacaaattatgcttactcttaatgtaactgatgacagcctggttcatccgatcgccagcataacgtaatgattgagaagttacaatttcacccattgataaaactgcaacgtcagtggtacccccaccgatatcaatcaccatattaccttgcggtttaaaaatatccaagcctgcaccaacagccgcaactttaggttcaaagtctaaataaaccttgccgccaccagacttttcagctgcctgaataattgctttttgttcaattgaagtaactccagtaggagcacaaatcaaaatatttggcttggacataaagccttttacatttaatttttcaataaagtaagacagcattgcttcggtaatgtcaaaatcagcaattaccccattcttcaaggggcgaattactcgaatattacctggagttcttcctaccatctcatatgcctctgaaccaactgcaactaccttgtttgtatcggtatttacagctacaacagaaggttcatttaatacgatacctttaccagagacattgatcagtacgtttgctgtccccaaatcaattcctatatctcgtgccacgataaccctccataattattcaccgtccattttaccataaataatcatgactttcctttactgtccttgttttaacacaatctttaaaacaaattactcaattgcattgaagtatcgataaaagtaatgacaaaattgccaactaaaaagcctaagccaattgcaataaataaatataataattgcgtttcaaaaacatggcctttacgaataattttatctagttgaattgctttaactgcttgaaaagataagccaatcgcaatcaaatatataatgatactaataatgacatgaacgcctaattgaaacatatattttcctcaattttgacaaaaaaagacggatgcagcattttgtgcattcgtctcttccttcttctagtgacctttagtgttgtacacgctaattctgttcattgctcgtcttaaagcaacttcagcacgtgccatagtttgttcgtcatgtttttcccgtgcttccttcaaacgttgctcagcgcgttgcttcgctgcctcagcacgagaaacatcaatgtttcttgcgcgttcagcactatctgcaataatcgtagcaacattattcgaaaactcaatatagccacccgaaatcgcaatatgatcaactactgaatccatttcacggcttcgcttaatcttaacctcactaataactagtggagttaaaagtggtacgtggttatacatgattgaacgttcaccatcaacggcacgtacatcaacgatacttccacgatgtgaataaatcattccattaggagttacaacatctactttaaaaagcttctctggatctgccatttgacatcaccctacttttctagtaaagctttagcttctggatcacttggagttacacccatttcttgtgcttttttcaaaacatcttcaattgggccgacaccacgaaaggcatcttctggtaagtcatcaagatgaccatccaaaataagcttaaagcccttaatgctttccttaattggaacatatgaacctggtacaccagtaaattgttctgcaacaaagaagttttgtgacaagaagaattggaccttacgtgcacgtgcaacgatcaatttttcttcatcagacaattcatccatacctaaaacagaaataatatcctgtaattcatggtaacgttgtaaaacatgttgtactcgagtagctacttcatagtgttcttcaccaacaacttcagggtcaagggcacttgatgaagattcaagtgggtcaacagctggataaataccttgttctactaagctacgttccaagttagtagtagcatccaagtgtgcgaatgtggttgatggagctgggtcagtatagtcatcggcaggaacataaacggcttgaattgaagtaattgaacccttcttagtagaagtaattctttcctgcaattgtcccatttctgttgctaaagttggctgataaccaacggcacttggcatacgaccaagcaaagctgaaacttctgaaccagcctgagtaaaccggaagatattgtcgataaagagcaacacgtcttgaccctcaacatctctaaagtattcagcaagtgtcaaaccagttaacgcaacacgcattctggcaccaggcggctcgttcatctgaccaaataccatggccgttttacttaaaacgcctgaagctttcatttcgaagtaaaggtcgttaccttcacgagttctttcaccaacaccagtaaatacggaaataccaccatgttcttgagcaatgttgtgaattaattcctgaatgatagtagtcttaccaacaccggcaccaccgaacaaaccaactttaccaccacgtacatatggctcaagcaagtcgataaccttgataccagtttcaagaatttcacgactagtagtcaagtctgcgtacttaggtgcttccttgtggataccttcacgagggtgatcttttgaaaattctggaccaccgtcaattggttgacccaaaacgttaaacacgcgtcctaaagtatcttcaccaactggaacggaaattggaccgccagtatcttcgactttcataccacgacgaagaccatcggtagattccatggcgatcgttcttaagacaccatcaccaagctcaagtgtaacttcaaggacaatgctttcatcctctgacttaattacacgcaaggcattgttaatatcaggtaaattcttatcaattgggaatttaacatcgacaactgggccgattacttgaacgatttcaccttcactcaaaacatctacctccttttctttattactctaaggcatttgcaccactgataatttcagtaatttcagtagtaatttgtgcctgtctagcacgatttaattttgtagttaagtttgataccagatcattagcattatcagtcgcactctgcatggctgtcattgaactagcatgttcggcagtcttagcatccaaaatagcaccgtaaatagtagaacgtgcatattgtggtaacaacttcattaacacttgatttggatctggttcaatatcgtattctaattctttatgtgcttcagcttctttgacaccaatatctaaatcgacgattggtaacattttttcaacacgaaaagcagatgataatgagttaacgtggtgagtataacatacgtaaagctggtcatagacaccattcaaaaacatcttaattgcggttgaaacaattggtaaggcttcatcaaaagttggtacatccgaaacaccattcttttcataaacaacgttaatattgttctttttaaagaattgtgccgcaaccgaacctacagcaagaactttgatatcgtgtccttgagcacgttcgtcctcaaagatactcatcatattcttaatgacattgctgttataagaacctacaagaccacggtcacctgaaattaccaagaaacctgttgtcttgatattcttacgtggctgaatcatatctgccgtaatccccaaaccaaagacatcagtataatcaatttgagcaacattgttcttatcaattgagacgtctttttcacgtatattatcaactacttctgagctaattaaacgagaaatagttctacgaatatggtcgttataaacggtataacctttatcacgattttcagtttggttcaactttgaagcagagaccattctcatagcttctgtaatcttaccagtttgttttactgaagcaatttttttctttaactcaagtaaagatgcaggcatattctacctcctatttctcacttggtgtaaagctctcactgaattcttcaattgctgctgacaatttcttatcatctggcaattgactagtttcacgaattgtcttgagcaaatcagcatgactgctgtcaaagttatcaaataattcgttttggaaacgagcaatatcttcaactggaacagcgtcaagatatccgtgagtcaaagcataaagaatcacaacttgcttttcaacaggaattggatcatgaagtggttgtttcaatacttcaacggttctttgacctctattcaacttagcttgagtagcttgatcaagatcactaccaaattgagcgaaactttcaagttcacggtaagctgcaaggtcagtacgcaaagtaccagcaaccttcttcattgccttgatctgggcgttaccaccaacacgagaaactgagttaccagcatcgatggctggacgagtaccagcaaagaacaaatcgctttgcaagaaaatctgtccatcagtaattgaaattacgttggttggaatatatgcagaaatatccccagcttcagtttgaataattggcaaagctgttaatgaaccgccgccaagtttgtcattcaacttagcactacgttcaagcaaacgtgagtgtaagtagaaaacatcacctggataagcttcacgaccaggcggacgacggagaagcaaggaaagttcacggtaagcgacggcttgtttggataggtcgtcaaatacgattaatacatccctgccattgtacataaattcctcacccatagcagtaccagcatatggtgcaatataaagcattggtgctggctcacttgggcccgcttcaacaacaatggtataatccattgcgccaaaacgctttaaagtttctacttgagttctaacggttgattccttttgaccaacagcaacgtaaatacaaattacgtcttgccccttttggttaaggatagtgtcgatggccaaactagttttaccagtcttacggtcaccgataatcaattcacgctgaccacgaccgattggaactaaggcatcgatagccttaataccagtttgaagtggttgatcaactgattgtcgatccataacccccggagccttggcttcaattggacgactcttgtcagtcttaatttcacccaaaccgtccactggttgacccaatgggttaactactctaccgattaaggcgtcaccaacaggaacttccatgattcgtccagttctttgaacacggtcaccttcacgaatattgtcaaattgacccaaaataatgatacctacatcatttgattcaaggttttgtgcaataccgtatgagccgttatcaaacttcaataactcaccggacaaaacatcgttaagtccgtgagcacgggcgataccatcaccaacataagttacaacaccaacttcgctgatgtcgagcttatcgtcgtaatgttcaagttgttgcttgatcaaggaactaatttcttccgctttaatgctcaatggtttcacctcttttaatttttatcaattatctgcgcacggatcttcttcagtttattcttaactgatccatcaatcacgcgatcttctacttgaagaaccacgccgcctaaaatacttggatcaactttattctctagacgcaccacgtttaggttatatttcttagcaaaactttcacctaaacgcttgagttgatcatcatctagcttaacagccgtagttgcaacgccagatgcgaccttcttttcattatcataaagtaagacaaagcgatcaataatatcgatcaaatcagcaaaacgatcatatttaaataacaaattcaaaaagttttgaacctcatctgaaaaatctttttcaattgcagtcaaaagatcctttttatctttactacttaaaataggatcgctcaagacactaatgatttgtggattggcttcagcagccttttttaattccaccatttcattataaacagtgtctaatgcatcattgtcttgcgcataaccaaatagtgcggcaccgtagcgtgctgcaatttcttctctacttaaagccattaatcatccaaccccttaataaattggtcgactaaatctttttggtctttagcagataaattcttagcaattactttttcagcgattgctacagaaatatcagcaacttgatcgcgtgcagaattcaaagcgtctgcttttgcctgagcggcatcttcattagcctttttgcgaattgctgcagcatcttcgtttgcatttgctacgatttctttacttgtgttttgcgcgttactcttagcgtcagagagaatttgtgttgcttcttgtcttgagttcttcaaggcagcttcacgctcattagcaagcgtttcagctttctttcgttcactagcagctgaatccaagtcatcaataactttttgccgccgcttttccatcatatctgatactggtccccaagcaaagtgcttaataagaagcatcaagatggcaaaacagatcaaataccagatagcattacctaagtaaatatgtgaggctgcaaataatgtttgaatagtcatttactgcccttctctctttaatactattcctttaaacagaaaattatctctttttattaaaggaacaaaatcaagaaggcaacaacgatagccaaaataggaacggcttcgatcaaaccaacaccaataaacattgttgctctcaagttacctgcactttcaggttgacgagccataccttcaagagtctttgaaataactttaccgttacccaatgatgcagccaaagctgctaaaccagctgcaatggatgcagcaagatatttaaaagcttctgacataaatttatacctccaaaaatttattctgtagtaaccttcttaccaatgtaaaccattgataaagttacaaaaacatatgcctggatagagccaatgaagacagagaaaccttgccaaatcatggctaatggagctgccaaaactaacgtaaatggtccaccagcatgtgctagatcattaccaattaaagttagcaaaacttcaccagcataaatattcccatatagacgtaatgataaggttaaaaagttggtaaactcttcaattaaattaattggaagcataaaaccaactggttgcgtatagctcttcaaatatccgccaacaccaaatcgttgtacgccgaatgtgaacgatagaagcaaggtcatcattgcaaacgacattgtcgctactggatcagcagttggtgatttaataaacatccaatcatcaactttgacttccatgaacatccctaattggttcataaaccaaataaacaggaataaaacaaatgcatataatgacaggtgattttgagcatccttgtcgctaacgttatctttaacaatgccgttagtgaaatcaagtaaatactcgaacacattttgtctcttattgggtttcatttcaacttttcttgaaagccaaatgcagataaataaaactgctaaaaccattagcgttgaaccgataataccagaaagttcaaaattcaagcccatgaatttaaaaacaaatgatttctccattacttcgtgacctcccttctcgtgctgaataaaactcgaacacgtaaatcatcttaacaccaaaaaaggtctttgtgtaaaatgaaagcgcattagagaaaatatttttctaaaaaggacgattacttagtaccaaatagtctgtcaccagcatcacccaaacctgggaaaatataaccattatccatcaatttgtcatcttcagcagctgcataaatgtcaacgtcaggatttgcttcttgaactgccttaataccttctggagcagctaccaaaacagcaagcttaatttccttaacaccacgcttcttcaatgcagcaatggcatcattagctgagccaccagttgcaagcattggatcaacgactaaacattcacgttcagcaatatcctttggagccttgaagaaatattcatgtggcttcaaagtcttttcgtcacggtacatcccgataacggcaatcttagctgaaggaaccatttcaaggacaccattaagcatccccataccggcacgtaaaattggcacaattgtcaacttcttaccagcaatttccttttggacagtcttacccattggtgtttcaatttcaacatcttcaagtggcaaatctctagtgatttcataggtcattaacccaccaatttcaccaacaatgcgacggaattcatttgaccccgtatccttgcgacgaataatagtcaacttgtgttgaatcaatgggtgatccaaaactacgaactttcccatatatgcctcctataaaaaataatatgatcattaaatattttaatcaaaaacgcaaagggtttaaagccctttgcgttttattttttatttattgaaatgatgtccacctgcagctttattcaatcgattcatgtaagctaaactttcttcaccttcatgaaatccttgtacataaatagtttcgatatcatcttgatcatcgaaatagcgcaagccaccaaataagttatggtcggcatcaactaaattgttgcccagatcaaatttatttgcttgaggtaaattaattttagctaagactggcgctaaagctgctacaccagttttttcattaaaatcaatttttgcaaaatcagcaggatcatcaaccacgactaccggctcacttggagcataatgacggtatttcattcctggtgccttaggtatatctttgtctgacactttgcccgtgttaattaaaactttttcacctaaaacttcgcttaactcttctggagtaatttcaccaggacgaagaacgattggtgtttctaccgataagtcgataattgtcgattctaatcccacacgagtagggccatcatcaataattccggcaatcttcccttttaaatcatggtaaacgtgctctgcagtagtaggactaggcttagttgaggtattagccgatggtcctacaattggataacccaatttagcaattaaatcatgagtcaattgatcatcaggacaacgaaatgctacagtatcaagtcccccagtaactgcatctggcagagttcctggtttaacaaacaatagcaatgtcaaaggacctggccagaaatgtttaattaatttcttagctctttctggaacttctttagcatacttagccatcatttcttcgtcagaaacagtaacgatcaatgggttatcacttggacgtcccttagcagcataaacgcccttcacagacttttctttggttgcaattgcacctagaccatagactgtctcagttggaaaagcaaccaattcacccttagctaacaacttaactgcatcattgatttgatcttttttaaaaatcttcgtttccatcattcttatttttgccaccttccatgaaccatgcgtggcttgccggccatatcttttctaaattcgatttcaaaatcaggcaattctttagcaaacaattccttcagttgttcttcttcgctaaaaccaaattctaagaaaaattctccatggctattcaaatgctcacgcacttgcttagcaaatttcttatagaagtctagaccatctttgccagcaaaaagagcttctttaggttcattttgcaagacattttcatccattacattcttttcgcttgtcttaatatacggcggattagagatgatcttatcaaattcttctaagcccaacagcacgttggctttacgagtagttacatcaagatcataagttaaaaagttttcctcacttgttcttaaggcagtatccgttacatcactagcatataaagttaaatctgtaatgccttttttctgtgcttctttagctaaagccacggtaatacagccagaaccggtacccaagtcaaggacttgatcacctgatttaagtgtctgcaatgcccattcaaccaattcttcagtttcaaaacgaggaatcaagacaccgcgttgcaccataattttatagcccaaaaaccaagcataacccaaaatatactgtggagatatgcccttagccaatttttcgatatctttattggcctgcttaatctggtcagcagttaagtccatttcttgcttcagttcaaattcacttggtgtcaagcctaagcgctctgctagaacataatcaacatcctcaggacgcgcattttcagcactctcacccgctttaatacgcatctgctttaaagtcattttaggcattttgatcagccaactcctctaattgcttagtttggttgtaaagaattaatgcatcaataatttcatcaagttcaccgttcatcacacgatcaagcttgttaatggttaagccgatgcggtgatctgttacacgattttgtggatagttatatgttctaattctttcggaacgatcaccagtaccaactgcattctttctcttagcatcgtactgagcttgattttgactttcataatagtcataaacacgtgatttcaaaatttgcattgccttttcacggttctgttgttgactacgttgatcctgcattgcaactacaatcccggttggcaagtgagtcattctaacggcactagaggtcttgttaatgtgctgaccaccggcaccacttgaacggtaaacatcaacacgaatatccttaggatcaatatcaatgtctacttgctcatattcaggcataacagcaacagtggcagttgaagtatgaacacgtccttgagattcagttactggaatccgttgaacacggtgtgcaccattttcatactttaatttcgaataaaccttgtcaccagtaatcatgattgccacacgtttatagccgccaacctcagtaggttctgaatcaatcattgaaaccttccagttttgacgttcagcatatttttcatacattctaagcaaatcgccagcaaacaaagaagcttcgtcaccaccggcagcaccacggatttccatgataatatctttatcatcgttaggatccttaggcaacatcaaaatcttgatttgatcttcaagctcgggaatttctttctcaatttcagaattttcttccttagccatttcaattaaatcaggatcagtttcactggagataatttctttattatcttcaatctcttttttgtcctctttgtacttcttatatttttgtactacttcacgcaaatcggcttcttccttagaaatctccatgtagcgcttagtatcattaataacttcaggatcggccatcatttcctgaagttcttcatagtgagctactagaccctctaattgagccataactttatccataaactaaaaatcctctctatctttcaacacctgggtgaaagtaatgatagcgacaaacaggataataactttcatcgccaccaatttgtacttgttcaccctcataaacaggcttgccattgttaattcttaaattcattgttgccttgtgtccacaataatgacaaatggtcttcatctcttctattttatcagcaaaaatcaataaattttcactaccttcaaatagatgattttgaaaatcgttttttaagccaaaggtcattactggaatattgaacacatctacaattttagcgcattctaagacatgatgtctcttcaaaaattgtgcctcatcaattaacacacaagctagtttaccatcaccatcagcaacatctgctttgttcatctttttaatataatcaaatagattcatatcagcagtaattggaattgcttctcggtgaagtccaattctagaagcaaccgttcctacaccgctacgattatccaagccactggtcattagggcaatcttgcgcccctgtgcttcataattgtgagctactttcaagatctcaattgttttgccactgctcattgcaccataacgaaaaaataattgcgccatgctggccctcccttttaacaaaaagtcttcgccttaatagtatagaggaaaaaataaatttgtgtaggtattaaacctcgttttcatcctcgctctatgctaaacttagacatagttttaaagtgagggatgtacatgagttttaaatcaggaattgctaaagttgccggtaaatcaagctattggtttttgcataatgcccttaagggcggcaccagttttccaggcaaattagcaatgaaaattgatccagaagttttaaattctttagccaaaggctatgaaactgttattgtcacgggaactaatggtaagacaatgactactgctttgattgttgaagctttaaagaaaaagtatggtgatgtgttaactaatccatctggttccaacatgcaacaaggaatcgtgaccgcttttttggctcacaagcacaagagagttaaaagaaaaatcgctgttctagaagttgatgaagcaaatgttaaaatggtaaccaaattacttcatcctagcgtctttgtattaaccaacattttccgtgatcagatggaccgttatggtgaaatctataccacttatgacaagatcgttaatggtattaaattagcacctgacgctacaattatcgctaacggagatgcaagcattttttcatcagttgaattgcctaataagaaaattttttatggctttaaacttcctgatgacaaacctgaaaatgacttcaaggctccagtcaataccgatggtgttctttgtccaaaatgcgaccacattttacattatcatgaacgtatttatgccaacttaggcgacttcttctgtcctaactgtggctaccaccgtcctgatttaacttttacagttaacaagattattgatcaaacacctaatagctcaacgttccaaatgggcaacaagcaatattccattaatattggtggtacttataacatttataatgccttagccgcctattctgttgcacgccactttggattaactgaagctgaagttgctcaagcttttgcagaaaataaacggatctttggtcgtcaagaattaattcactatggcgataaggatatcgatttaattctagttaaaaacccagttggtttggatgaagtcttgcacatgcttaatacagaaaaagatgattattcactagttgccttgcttaatgccaaccacgctgatggaattgatacttcttggatttgggatgctgattttgaaggattagacaaagaaaagattaaaaagatcctcgtcggtggtcaacgctggcatgatatgggctttagacttgaaattgctggctttgatccaggacaaatgagtactaatccagatgatgatagcctaattgaagaaattaaaaaactgccaactaagaaggtctatattctttcaacttatactgcaatgcttgcacttagaaagaagatggccgaaaagaaaatcattaaggctggtatgtaaatagaaaggattcccgcgggaatccttttttgtgtacaaaaaagctgtagctctaatgctacagcctttctaattattgggatattggggctcgaacccaaacatccaggaaccagaatcctgtgccttaccaatttggctatatcccagtaaatcacccgtacgagaattgaactcataactccaccttgagagggtagcgtcttaaccatttgaccaacgggcgaatcaacatttataattatgcttttttcttctatgcttgtcaagtaattttgactataataatgctaatggatggtgaaacatgatcgactttaataaaacacagcatttaattgaatcaatggtttttgaacgcgttgttccaggcgtcaattacacttttatcaaaaataagcaaatttttacatcaactactggttttgctagtatctacccagaagttactcagctgagcccttttgcagaatacgacctagctagtttgactaaggttttagcaacagaaaatgtcttgcttaagctttatgaccaaggcaaacttaactttactgagcccttgcagcaatttattcctgaatttaaagaccctcgtgtacgcctttatcacttgctaacccatactagtggcattcgtggctggatcccccaccgcgacaaactagatcatgatgccttactacaagcaattatcaatctgccagtaactgacgaatttgaacacaagatgcggtatgccgatacaaactttatcttacttggattagttattaaaaaaatttttggcaaacctgtccaagaagtagtcacagagcaagtcctcaatcaaatgccgcttgaaaatactactttttcaccacaaaaggatgattgcgtgcctactgccctagttgatggccatgtcttgcaaggtattccacatgatcctaaagctagacaacttgaaatagattgcggttctgctggcttattttccaatcttcaagacttagttaccttcgcccaaggttatttaggactaaaggatgttttaccttatagtcaaaagactgtcagccagctatttgataataaaaatccccaaggcataaaaccacgctcttggggatgggaccttcggtttgatccaaagcaaaattatccgatcattttgcacacgggttttactggtactttaattattcttgatcgcatcaaacgctctggtctaattttattgaccaatcgagtccatccgactggacacaacactgttttcttagctatgcgcgaaaaaattatccatagttttatcaacgaaaacgccaaaatataatttatagaaaaaagacggctgtgtgtcagtcgtctttttatctctcactaaatttcatcatccgtctagtattataacttattttaacgctaatgtactagtcaaatattatttttctgctttaaacattttccagtagctaattaaaatgattaatgccattaataaagtaaaataaaaggctgcctgactaccttgagctgtcgccagtgcataggacgctgcaccctttttcggccaaatcgacataattgctgctaagatagttgttcctacagaaccggctaattgctggctagtctgacaaactgcggttgcatcggcgcgcgatgctcctttttctaccttcaaagcttcagctagcgtgttagaaaatgacattctgtgtcctaacatcatgatgccataaataataatgatcatcatcacagtcaaatttaagccaaaaatagcaaataacaagcagctgatcgccattaagaagccacctaaataaagtggcaatttagctccttttttatcatataggctaccaaaatatggattgagtagccctgcaataatactacctggtagcaaaatcaaaccaccaactaaagatgtttgctttccgacaatttggatgtagttaggcaatacaaaactgataccaatattattaaattgcaataaaaagtaagctaacgcaccataaacaaacgctttttgcttaaatacggctagatctaacaatttcttggatgattttttagataatctaacaaataaccaaattaaaattgcagtcacaattaataaaatccacattaaaggattagcaaatccattactaatttgatttacgcctaatgtcaaagtaataaatgctatagctaaaacgataaatgatagccaatcaaaactatttttagtttgttcatgatacttaccgactacaaatagcccggcaacaaaaacaatgatcgcaaaaattgtaacaaaaccaaaaatccagcgccagttaagataaaaagtagtgataccgccaaatgctggtcctaaagtcggtgccatagctactactaagccggcgattcccatgtaaacgccccatttttcgcgaggcataacttcggttactaagttaaacatcaacggtgtacttaatcctgcacctagagctgaaatcagccgacctaacagtaaaataggaaaattaggtgctacagcactaattacgcttccaatcataaaaccaacgcaagcaacaataaacaattgccgcgcagtaaaacgttcattcaaatatgaagaacaaatcataataatcgcaatcgccaataaatatcctgttgtcgtccattgaattatatccaaaccgacaccaaattgcttcatcatcgtaggaaaagtgacgtttaaactagtttccgtcaaaattccgacaaatgacataaacgcagctgataatactgctaaaacatttttagtattctctttcacacaaaaatcctttccacaaaaaaagaaagagcaaaaaacctttgtttcctactctttctttaattagcacagctaattatattaatacgcatactatcaaatatgctgagtatatctaatattaaagacgcttagctaagtcgtcgtgtaagttttcgtaacctggcttgttaagtaaaccaaacatgttacgcttgtaagcttcaacacctggttggttgaatgggttaataccgttcaagtaacctgaaatagcaattgctaattcgaagaagtaaatcatgtaacctaaagtatgtgcactttggtctggaatgttaacagtcataactggaacaccaccatcggtgtgagccaaaacaacaccttcataagcacgatcgtttacgtagttcaagctcttaccttccaagaagttaagttggtcaaggttcttttcatcgcctgggatcttaacatcatgacgtggattttcaacacggataacagtttcaaataaattacgtaaaccttcttggatgtattgaccaagtgagtgaaggtcagtagtgaagttagcgcttgatgggtaaatacctttttgatccttaccttctgattcacccattaattgcttgcaccattcaccgaacattcttaaacttggttcatagttttcaacaatttcagtagtgtaacccttacggtaaaggatgttacgaagtgctgcgtattggtatggagttgcctttgacaaatcagtatcagtgtagtcagcacgtgcgtctgcagcacccttcatcaattcgtcaatgtcagcacctgaagcagcgattggaagtaaaccaacagctgaaagaacactgtaacgaccaccaacatcatcaggaactacaaattcttcgtaaccttctgcatcagcttcagtctttaaagcacccttttgacggtcagtagttgcataaattctcttagcagcttcttccttaccatacttcttgattaacttgtccttgaagattctgaaggctactgatggttcagtagtagtacctgacttagaaattacgttaacactgaagtccttgtcgcctaaccattcaatcaagtcataaaggtatgagcctgaaagtgagttaccacagaagacaacagttggcataccgttcttttccttgccatagaaattgctgttcaagaattcaattgcagcttgggcaccaaggtaagaaccaccgataccaatacaaatcaaaacttctgaatctgattgaatcttcttggctgccttcttaatgcgggcaaattcatccttgtcatagtcaactggcaaattaagccaaccacggaaatcgttacctgcaccagttccatcgcgaagttcagtattagcagcgttaaccatagcttgcatttcgcttaattcattttcatgaacaaattgtgttagtttactactatcaaatttaattaaactcataaatctgcttcctaactaaataaaatatttttcacaaacctattttaacaatcttgatttataaataccagtacattataagcgcattcaggcttttttgacaattttaaaaatcacataacccaaaattgctccacaagtattgaagaaaacatcatcaatatcgctaacccccgtcaccagcaaaaactgcagagtctcaattcccactgaaaacagcatccccatcagtaccgtccttaaaaacgttgctctttttgaaaaaacaatggggaaaaaaatgccaaacggcacaaagcacaagacattgccaaaagaattataaaagaaatccaaatgactgggagcatagactaatttccaagtttccttcatgaataccaagttaatatcactcaatggcctagagaaattaaaatcaagctgccacggaaagtaggtatttctaaaagttgtcagcatcaaaactaagattatgtaaaaagaaaagacccaaacgctagcttcagacctaattgatcttctgcggcgcaccaaaagaagccaaattaagcgcaatacagcaaaaattaaaaaataaaatattgttttatccagcgctaataaggttaatttaactaatgcaaagtggttaatattagttgcatactgtttagctaaaaaactataaagtgggcccaaaaatagcatactttgcctctttccaaaatattcattatagattatacctattttcacggctggaaaatcttaaaaaaaagataactcttagcaaattattgttttaaaagaggtgaaccattaaaattaaaagatgttaaaggagcattatatggaaaaaaagaaaattatcagttttattcaaacacgaacgggctttttaacccttttagttgtttgtttctggctgaaatatatttttgcagcttattttgatttcaatttaggcttgagcgacccgtatcaacatttcattatgtggctcagccccgtagggtccgccatcattttaatcagcttcggtttttatattcctaaaccgctgatctcttacatcacaatgttaattttagactttgccaatacggcattgctttttgcaaatattatctactatcgtcaattttcggactttttaacaattaaaacgatgtctaacgttggtaaagtttcgcagggtctaggtaaaagtaccgttgcccttctgcatccaacagatattattatctggattgatttgatcgttattgttactttactgatcattcataaaatcaaaattgatcaaagatcttacggcttatccaccccatttgcgattacctcagtaggcgcatttgtcctaactcttaacatttttttggcagaaacctctcgtccgcgcttattgcgcaacacttttgatcgctcctatgtcgttaaataccttggtattgacacctttactgcttatgattgcttcaagagtgcgcaaaatgttcaagtcactaaaaatgccaacgctgcggacttgaaccagattttaacttttaccaaaaaacaaaatgctgctccatcttcctcatattttggtattgagaaaaaacgcaatgtgattatcatccacttagaaagtttccagcaatttttaattaatcttaaggttaatggcaaagaagtgacgccgttcctaaattcactttatcaaaataaacatacgctcagttttaacaacttctaccaccaagttggtctaggtagaaccagtgacgcggaaaacatgctagaaactagtacttacggtattcccgacggatctttattcacttctttaggttcggaaaacacctttcaagctgcaccgcaaattttgcgtcaagatggctatacttccgctgtctttcacggcaacgtcggtagtttttggaatcgaaatgatgtttataaaaatatgggctataattatttctttgataaaaattactatagctcccaaagtaaagatgcaagcggctatgggttaaaagataagctgctttttgccgaaagcgttaaatatttagagcagatgcagcagcctttctatgctaagttcattacggtaaccaaccacattccgtttaacttagataaagaagacaaggaccctaactttaagactacaaacactgccgaccaaactatcaacaattactttgaaactgcccactacctagatgaggcattgcgtgaatttttccactacttaaagtcttctggtctttacaaaaactcaatggtagtcatttatggtgatcactatgggttaagtaattctgaaaatgaaaccttagcaccaattattggtgaaagctctgacacgtggaatacttacaataatgttcaaatgcagcgtgttccattcatgattcatgccaataatttgaaaggaaaaattaatcatgaaattgctggtgaaattgatgtcttgccaacactgatgcatttgctcggtattaacaataaaaactatgtccaattcggtagcgacatgctttcgcctaaaagacaaaattggatcgtctttcgtaatgggaccattgtcagctccagatatatcatagttggtgctaaaggaatcaaaggtaccgtttatgaccgagttagcggtaaacaaatcattaattttactcctcaagagaaaaaagaaatctctgagctagcacaaaaggccaaggcatcattagactattctgacttattaaacaaccacaatttgttacgcttctacaccccaactggctttgtccctgctgatccaacccaatttgattattccgtcaattatcaaaaaatgatcgctatcagaaatgaattagctggcaattccacctcgctttatagcagacatcgcggtacaactactaatctttaccgtactgatgccgctgaactaaaagatagaaaacaagaaattacccaagttcctgacagcgttaaaaatattaaagagaatacgaaaaacaaaaatagttcagaaaataccaataactaaaaagaacgcacagacctttcaaaaaaactgtgcgttcttttttagtttttagctacaaactgttcatagcccttgtcataaaaggtcacggtgaatgtggaacctttacctggtgcggaaaatacttctactttgccaccatgttgcttaatcaaagaagaaacaatcgcaagtcccaagcctgattcgccagttcccattcgagcacgcgatggatcagccttgaaaaagcgttcaaaaatatacttagtctgattcttgctcatgccaataccattatccttaaccgataattgtgttccatgctctatccgtttacccgaaataataattttgccatcatgagtgaattgaatcgcattttgaactaagttaaccattacctgggtaaaacggtcacgatctgcataaataggcaactgatcaggtgcctctacaaccagctcatcgttggctttagttgcattttgttttaattgcgacttcaaatcatgcagaataattgtggcattaaagttagtcttaaccagcataatttgattatttcgaatcttttcatagtccaaattttcattgactaaccgaattaatcgtttagtttcgcgctgcattaacgcgattgacttcggtttagaatcctctgggatagcatcgtattgcaagccctctagaatgccattaattgttgtcaatggcgtccgcatttcatgagcagcatcagccatgaattggtctcgtcgctcttcttgagccttaacctcttcgttcgactgcttcaaagcctgcaccattttattgaaattctcagccaattgatcaatttcatcgctatctttatgctcaatttgcacattaaagttacctgatgcaactttttgcgtagcacgtgataatcgcttaattcgtttagttgaataataagaaataataaagctcagcaacaatccaaccgctacagtaattaacaatgcacgcaacaaattgcgtttagccattaaaatcggtcgctcaacatgctttactctcgatcctatccaaacaatgccaacaagatttttgccattcatccatggaaccaaaacccccgtgtaggcatccttagttgaactaatcggtgaattttcattatgattattttgaattctaatctcttgcccattttttaaagtagtaaaaacttcttgtgaaagctgaattctagcctttgttttgggataaatctgctcatttttatcattaaaaatacgtaaatgagcatcatcaccacgaagaacatattctaattgattcaagaagttattgctaagcaatgcagtcccattttggctatcagcttccgccaagtttcccaaagaattagcatagctttccatccgctggtagttttgcgtataagcttgattacgcgcataaccaatctctgagtaaccaataatcgagatagttgtcacaataatgagtaagaaactcaacatattttggtaaattaatttcattatttgacctgcgaatcatcaaacttgtaaccgacgccccaaacagtttggatcaccttggcaccaaccttctctaatttctgtcgaagctttttaatatgagcatcaacagttctttcttcaccataatactcatagccccaaactagttctagtaattggtcacgagaaaagacttgtttaggcttttgtgccattgtatacagcaaatcaaattcttttggtgtcaaacccattaccggctgattatcaaataaaacttctcgtctattttttgaaatcttcaaatgatcggtcgtaatctcatagtcttgattatcttcttgagtatgagctggttcttcttccatcatcacgcggcgatgcaaagccttaatgcgggcaatcaaagcaattgggctaaatggcttagtgacatactcatcagctccgatacctagccccaacacttgatctgattcactgccacgagcagtaagcataataattggcactgtcggcgaaattgcccgtacctctttagctacttgaatcccatctttttttggcaaattcaaatctaacgtaatcagatcatacttatccgcgttctttttaaacatatcgacggcttcgacaccatcaacagcaatgtcttgttgccaaccttcttttttgaaaaacattcccatcatttcagctacggaagtgtcatcttcgaccattaatattctcaaactcattatcaatccctaaatccttttgttctcttatgcttcacttgatcaggatcgacatagtcatgtggcaattcatgtcgtttagacaaaaatgttttcaaacttttttcggtataaacaattggcaataagataaataaataaaatgttaacagccaaatgagaaaatagcgatcccaattcaaatagtgaatgattactcctaacagtgcttgaataaacccaaacaggatacaataccagcttgcccgtttctgagcaaacttaaaactatcctggttaacttgcgcaagataagataaatagccataaattcggttgggccttttggctggcgtaatcagccaaatcaaccctaccgccaccataactaagccacaagcgacatagatcacgatttctcactcctaattctgataaatttaaacggttattcctcacctggtgcagacataactattctcattttaccagtgaaagtgaaattcttcatctcatttggaataattaaattagttcccatcttcaaatcatatgacttgccatcagcttctaattttccttcgcctttgataacggaaactaacaggtatggatgatcctttaagccggtcttccaagtaccatcaaggtcaatttgccacaaataaaagtgtggtgaaagtggtggttcaaccaatgtcttaatttctgcatcttgatcttggctagtcttaacatctaacttaggatcaacatggggaacagtggtcacatcaattgacttttgagtatgaagctcacgctttttaccatccttgcccacacgatcgtagtcatacaagcggtaagttacatcacttgactgttgagtttcaattactaagcatcccttagttaaagcatgaattgtacctgctggcacatagaagaaatcgcctgctttaaccggaacttttctgagcagcttatcccattcgcctttgtggatcatatcagctaattcttcacggctttttgcatgatgaccataaataatataagcacctggatcagcttgcattacataccaagactcagtcttaccagaatcattttctactttgcgagcataatcatcatccgggtgtacttgaactgataaattatcattagcatctaggaattttaccaataatggaaattccttggccttagggttgccaaacaattccggatgcttcaagtaaacatcccgcaatgacattcccttaagtggcccatctgttacagttgacgcgtcatccttgtaacctgaaataatccaagcttctccaacttttccttctggaatatcatagtgaaaaatatcatctaatttacgtccaccccaaatttttggcctaaagtatggggttaaaaataatggttccatttaaatcacctcaattaaagtataaactttaaggcagaataaatgaaacccttttcttagatatatgtatactatttgttttacatgtaaagctacttgttatacttacgaatacctgtagctaatctttgcatcccatccttgaccatcgtcaaaggacaagctagattaattcgaataaaatcatggccatttccacgataaacactaccagctgaaataatcagcccagtttcttggcgaatgaactctgctaattcctgtgaatcagtactgatcttttgcacatcgatccacatcaaatatgtcgcattgcccgaaatgatttgtacttcaggaatgtttttttcaataaaattctgcacatacgcaaaattttgctttaactgttttttcaaagcattaagccaatcatggccttgctcataagccgcaatcgttgctggaatcgccaataaattaggctcggctacttcatcactatttaaaccgcggttaaccatattgcgcaaattttcattaggaacaattgccgtagcagaatgaagagcagcaacattaaaagttttgcttggggacactagtgaaatcacactattttgtgcttcacctgttacagaaaaggctggcgtgtaatctggaccttgtctaaccaaatcaccatggatctcatccgatagtaatgttacatggtattggtgacaaagatccgcaattttttgtacttcttcactagtccaaacttttcctactggattatgtgggttacaaaaaatcatcaaagtcgttagcggctcagctaatttttgttccaagtctgcccagttgatcgaataacttttaccatcgaaagctaaatcactcgacaaaacatggcgcccattattcaaaatggaattataaaaaatattataaactggctcttgtactaaaacattatcaccaatatgtgaaatacggcgtacaattgatgaaatagcagggactactccagtagtaaaaatcatccaatttgtttgtggccgatgattatgttctgtttcataccaatcagcgacagcattaaaataatctgcttgtgggaactcataaccaaatgcacctaatgtcaatttttgttgcattgcctcgataatttcaggtgccgtcttaaagtccatatcggcaatccacattggtaattcatcagacttcacatcccactttactgaatcagtctttgacctatctggtgcattttcaaaatcatattgcatatatctcactaatcctttggtgtttggttcgtatcagaatgaacaatttttgtacctattttcggacaatcaagctcggttttagatggatctaccttatctggatcgataatcaaagtaccaatctcaggtaccgtaattttaccagaaattgggtttttaatactatcaatctttgtattaagctccacatctaaattagaaacatattcaaaagctaaatctgtatgaatcaaggaaccattcttaatctcaagctgatcaatgtagttcaagccctgatcactttcaattttacaattaattaacgtaatgttgttagtattccaagctaaatattcaccatcaataattgaatcgtaaatagtgacattattgcaattccaaaaagcatctttagagataaaagttgaattatgaacttcaatgttttctgcaccatcaaaaacataatttcccacaacggaaacgtgatcaagataaatattctggctatctttaccaaaataatcaccattaatttgagaattggtaatcttaatatcattacaagtccacattgtttcttctgcgttagcaaaatgaacattatctaaaataatatgacttgtccttctgaataatttaggtgcctgtaaagcactatttttaattgaaatattcttggtataccaaattccagaccgtgacatagtttcaaacgtggtattttcaactttcacattttcatcataccaaagtggatatttccatttaaaaattgaattctttaatctgatatttttagcttcttttaagggagattcaccactgccaaatgtaataccatcaaggattgcatcagttaatccataaagaattctttcacctgcaaaatatttatttttgtattccataattgtttccacctttttgttaatttaataatcattaattttaggacagtattcattatatgatttctttcatgcaatgtttaatacttatttttagtgataatgcataacaaaaatgcatagcagataaacgatctagcaaaacaaaaaaccgctctagaacaacatctagaacggttatctatggagatgaggggagctatctttacttttagttgcttttaattacttctaagtactgaaattaagccactttgatgttggttgattttagttaattttgaagttggatacctttttggataccctggctaataatacaattcagacttagaagctttgccttagcctccaatacaaaaaagtcattctatagaaacttgattctagaatggagactgtaaaatagtttgtgtaaggatgaatgattccttaaatttatttctttaaacattagaaaaaggggttcctttctcgtatgattggtttgaacaaaaaaacacatacagaaagaagaactccttcatgaatgattttaccaaagattttgctcaagctctattcaatccagacaaaataaatgatttattgcgcaaagagctacaacaggctgttaataacttgttagaagctgaattgaccgcctttctgggctatgatccctatgccagaaatggctggaatactggcaactctagaaatggtgcttatttccgcaaagttgatacgcaatttggcccaattgaagtgcaagtgccccgggatcgcaacggtcaatttcatcagcacacgctgcctggctacaagcagcactcggatatcttggaaagcatgattatcaagctttactccaagggcgtgaccaccagggaaatagccgatctaattgaaaagatgtatggcagccattacagtccagctcaggtatcaaatatttccaagcagatgattccaaaggttgaggcttaccacaaacgcaagctaagcgacaagtttttctgcgtctatttggatgcgacataccttcctttgcgccgagaaacatttgagcgtgaagcagtctatattgccattggcatcaagcctaatgggcacaaggaggtcattgactactgcattgcacctagcgagaacattgaagtctggacagatatgcttcaaaacatgaaatcccgaggcttaaagcaagttgagctttttctttctgatggtgttgttggcatgaaaacagccttggccaggacttatcctaaagctcattttcaacgctgtttggttcatgtcatgcgcaatatctgcgctaaagtacgcgtcgacgatcgtgaaaagatcatgaacgaattcaaacaggtgcatcaacagacaaacaaagaagaagccacagctgtcctgcatgacttctataccaaatggggcaaggtttacagccatgttatcagaagcttgaaagacatagaaccagatctgctggtcttttataactatcccaagcagatcagagcttcaatttattcgactaacatgattgaatcatttaacaatgtgatcaagcgcaaagctaagcctaaggcagagtttccaactgaacagtcgcttgatgcttttattggcattcaggcaatgagctacaatgaccgttatttcaatcgaattcataaaggctttggtcaggttcaggacaccttagaatcctactttgattaaataaataattaaaaaatcaatttacgagaaagaactatttacacaaaagatttgacagtttcctagaatgacttttaatacaacaatacatatagtttaaatatacgctacatatatttaaactatcaatatatgttgttagaattcactgtctacaacttgccttgcaaaatcacatcattcaaaaaactagaagatgaactatatccatgttcttttgcaatctctgtcaatttagttcttgcacttggcgtcaaactaaaagtgtaaggtcgtctcttttctcttttaatataattacttgattctttagaagacactcccttactagagtcatcattaactctaggtgtttctttcaatacttctgcaaactttttaccttgatttgggttaaaactcatttaaaaagcctccttaattcctactacgctgtacctaactttctggtacccaaaacaacataccctggcttttgtttaaaagctgtcatataagtgatcaagcaatgaacctcacgccccgtataattttctgttgttggatcatattcttctagcaagagtaaatcacctacttgataattacgatcattttttctaatttcaaaatttttagagttatttacttgtgcttcaaaatagctcgggaaaatttttaccctatgttctttgatctcgtatacgccactcgatgtatatactttcattagcattacctcatattttatttatacattacatatacttaatacgcgtggtgctagttaaatcgttttagttaataaaaaagtccaatcttgttagactcgacttgtaaatagtaataatagaaaagagtctgatctgattgaactgccttaagcttaagcgttttagccaccatttacaagttagttttaaagatttagtgataatttgtcggcactggtatcgtttgtatgcaccggctgagtttactcatcggcgaaatattgatcaaattaaaactacggacagtctgattttggctttacttatctggcaagctaagacaggaattgaatcacaaagaagattctgtgaatgtttcaattgtttatcacactcacgttttaatcggcgttcacgtcagctattgcaattgatttatcagatacggcaagaaatgaataaaaaggttgacctgaatggacagttcttgatcattgacagctttccggtacctgtttgccaaccaattcgaaactatcgtgctaaaatttttcgcggttatgccaacattggttataaggccaccaagaaaatttacttctatggtttcaaagttcatgccattgttagcgatgacggttacattcttgattatgtcgtaacaaaggcatcagttcatgatgccagggagacagttgaactgatagaaaatacccatccatctaattactatcttcttggcgacgaaggctatttaggcaaagaactgcatcaacagctaaaacaaatgggttacgaactttggacaccatatcgtaaaaatatgacaggagctaaaaagcacaatgatcatcaattgatggctattcgcagaacaattgaaagcgacttttcgcttctgacctattacaatgccgagaacaatcgagcacgtagtctgataggctttcaaagccggttggaaattgcaattttagcttataatttggcttattgtctagaacgatttaactagcaccacgcgtatacttaatttatatttaatgtatatttgctttatacattatttgtaatggagagactgtaaaatagtttgtgtaaggatgaatgattccttaaatttatttctttaaacattagaaaaaggagttcctttctcgtatgattggtttgaacaaaaaaacacatacagaaagaagaactccttcatgaatgattttaccaaagattttgctcaagctctattcaatccagacaaaataaatgatttattgcgcaaagagctacaacaggctgttaataacttgttagaagctgaattgactgcctttctgggctatgatccctatgccagaaatggctggaatactggcaactctagaaatggtgcttatttccgcaaagttgatacgcaatttggcccaattgaagtgcaagtgccccgggatcgcaacggtcaatttcatcagcacacgctgcctggctacaagcagcactcggatgtcttggaaagcatgattatcaagctttactccaagggcgtgaccaccagggaaatagccgatctaattgaaaagatgtatggcagccattacagtccagctcaggtatcaaatatttccaagcagatgattccaaaggttgaggcttaccacaaacgcaagctaagcgacaagtttttctgcgtctatttggatgcgacataccttcctttgcgccgagaaacatttgagcgtgaagcagtctatattgccattggcatcaagcctaatgggcacaaggaggtcattgactactgcattgcgcctagcgagaacattgaagtctggacagatatgcttcaaaacatgaaatcccgaggcttaaagcaagttgagctttttctttctgatggtgttgttggcatgaaaacagccttggccaggacttatcctaaagctcattttcaacgctgtttggttcatgtcatgcgcaatatctgcgctaaagtacgcgtcgacgatcgtgaaaagatcatgaacgaattcaaacaggtgcatcaacagacaaacaaagaagaagccacagctgtcctgcatgacttctataccaaatggggcaaggtttacagccatgttatcagaagcttgaaagacatagaaccagatctgctggtcttttataactatcccaagcagatcagagcttcaatttattcgactaacatgattgaatcatttaacaatgtgatcaagcgcaaagctaagcctaaggcagagtttccaactgaacagtcgcttgatgcttttattggcattcaggcaatgagctacaatgaccgttatttcaatcgaattcataaaggctttggtcaggttcaggacaccttagaatcctactttgattaaataaataattaaaaaatcaatttacgagaaagatctatttacacaaaagatttgacagtttcaaagataccgtttaactcattgaaaaatgatccatacctagattgcatttttttatctttcatcattgtactgattgccactttatctaaagtggagcggttaaacagctctcgattgggaatcttaacaatgacacttggatctttttgtaaaacttctaccaattcacgagaagatctagtgttgtttttaatcatgtttccaacaaatagcaattttgcatctactaacgactgtctcgtacgataatcgattgtttctcgtttaagctccttaaagcgctcctctaagttgaacttggcactataaccgtgttcgctcggagtaataggactaagaatatcatcactaataatcactgcgttctttgtcgcaattgaaaaatcagggtggcaatcaataataatgtaatcgtattgatctaattttctagtgtcataattatctgctagccacatgtatagcagcatatttttatcgactttagtttcaatgtctgcttcaatgtcgtctaaatgcatatctcctgcaattagatcaatattttcattaatctgatggattttaacttgatcattctttaagaaaatattccctactgtatactcattatcataaatttgatatgtttgggtcaaattagattgatggtctaagtcgataaacaaaatccgtgatccttggttagccaaccattcgccatagttataggctaatgtggttttgcctaccccacccttaattgctgcaaaagtaataatcttcatttttattctccttactttattcatacattacgtataatctacttatgttttgtttatacttgctttatactggcaaagtattaaagaagccagctgatgcaagatacaaccaagtagtaatcactactacttgtgcgaccaacatccaagccaagaaggtcttatcaaattttgacgttttcttcatatgcatgtcctccgtaatttatatgctatgtataagttacttaacttatatttatattgtatatcatatttttgatacgtcaataaaaattagttctttttttgaataactatctttagtttttaagctatctattacattatgctgtcatttgtatgttataatgataggacattaaaaaggagctgattttatgacatcatcaactacaattcgtcttgatgacgatttgaaaaagaaattgcagaaagacttagatgctgcaggcatttcaatgaacgcttatttcgttatggcagcaaaacagcttgttttacaaaagagagttccatttgacattttaactgagccagaaattcctaacaaagttactgagaaagcaatgctcttagctgatgctaaagatgaaggtttggttccagatgattcacctagtttcactaatgtcaatgatttgatgaaatctttggatgaggactaatgtacgctgttaaatacgaaccacaatttaaaaaggactacaaaaagtttaaaaaagaccacccagagttaataaaagacttcaagaacacagttaatcaattagtcaataaaggcaaagtgggtgacggctatgatctccatccattagataaacgaggtggtaattacagtggacattttgattaccatttaagcgatggcaaagtcgatgttgtagttatctacaagcctcacaaaactaatccaattattcgactagtcagaattggaaatcatggagacttattcgaaggtaaagaaaaataagctatataaatacggacatatcaacgtaaatattgatatgtccgtattttttatatacaaataaagaaatattgcaaaattcattaagtagatcaaagtaagaacagccttcggagatactgacaagatcagttaaaattaaatacttaaacttcccacacgcagaatcgctccttttattgtgattctgcgttttttaacaaatataaaaggcacatgaccttttcattgctataattaaagtgaccaaacgataattctatgcatgaaaggcttgtgccaatgtctattttaccatctcctgaccaaaaaaatgaacaactattttcaaactcaatcatcagcttcatcaagaagtttcaggtgatcaagctgttgagaaaatgtggcttccgcaaggaaaaaggcattagcctgttcagcttgtttctttacgttttaagcaatgtctttcgtgaccgcagcttatatatgcagctgaaaacggatcattttaaagaaagcttttctaaaaattcttattaccgatttatgcgcaacgtccacgtcaattggctccacttcaccacactgctttctgcgcaaatcattaataatcacttgcgatctttgacttcagaaaaacgggctgattgctttgttgtcgatgattcctacttctctaggaccggcttcaagaaaacagaattagtcgccaaagtttttgaccatgtatcaatgacttacaagaaaggttttcgcatgatgaccctgggctggactgatggagcttctttcatgccaatcaattcggtgttgctgtcctctcacaagctacagaatatgattggcgaaaacaaagtctgtgatcagcgcaccattgctggcaaaagacgcatgcttgcccggactaaaggcacagacgtgatggttaatttaatcgaccaagctatgaaagcaggtcatcaagccaagtacgtgctgtttgacagctggttctcaaatccacatcaaatcgtccagctcaagcaaaggaagctggatgtaattgccatggttaaagttagctccaaaatcaaatatgaatttgaaggagaacgcaaaaacatcaaacagatttatcgtagctgtaaaaagcgacgcgggcgttcgcgctatctgttgtcaattccagtcaaggttggccgccaagacaaagacggtgctaaaattgacgctcggataatttgcgttagaaaccgtgccaatcgtaaagagtggctggctattatttgtaccgacatgtcgcttagcgaagatgaagtcattcgcaattatggcaaacgctgggatattgaagtttttttcaaaacctgcaaaagctacctaaaactaagcacggaatatcatggtctgtcctacgatgccttgactgctcatgtggctatagtctttacccgctatatgctcatgtcagtagccaagcgggacgacgaagatgagcgaaccttaggtgagcttttctattgcatgattgatgagctggcggatattacattcagtcattcacttcagctaatcacaaaagcaatggtggctagcgttgaaaaagtctttcatgccagtgaagcacaaatagcagaattcacggctgactttatcaatcgtttacccaaatacatgcaaaaattgttaaagaaaactagcaaaaatagtatagaagcccaaagctaagcaatatcaaagaattgccagcttatttgatgtgggaagtttaagttaaatattaaaaattaggattttatccttttttgaacttagctcacaaagatgaattgatagtttatagttaaatcatgtaagttatatgatttttagtatctttaacttgttaaaatagcaaaaaaagcaagtagttactgctacttgctggaagggagataacaactatggactttaagttccataactcaaaacgtagttggagacttgtagttacccctaaggtgctactagcaataatttttttaatcgcgaagtcactacacttcttttaattctaagcctgctgataacttggtaataatcaacaggcttttttattcccctaactcactgtatcacaaaaattgtttcaagaatttaaaactatgctgaaattaagaaatatgacggtacattcgttttaaatatcatctaaattatagaaaaaaataaaaaatcatggtagtatatagatacaaaagaagaaacatcttgcatatgcgagaaaattaagacacacaaaaatcgctactctaattccacaaatgagtaacgattttttgtttcaccaaagtttagagcaaataagctaaatgcttaagctgaggctagcgacgtctgtgatgttttttagagcctaatctaggacttttacgccttttgctatgaccattgtctagccgctgatcaaacaatttctttaagacataagaaactgcattcaccaaaagaggcgctaagaccgagctccacaaaagaagaaacaaatctagcatatgttcacctcccaatgcaagatttgatattggaaggcacaaacgccattaactattataacaaaagccatcctaaaaaatatctttaggatgactttttatacaatatatagtgcattatgaaactaagttattatcataatattttttaaaatctgttgtacttaaaggagactgtaaaatagtttgtgtaaggatgaatgattccttaaatttatttctttaaacattagaaaaaggagttcctttctcgtatgattggtttgaacaaaaaaacacatacagaaagaagaactccttcatgaatgattttaccaaagattttgctcaagctctattcaatccagacaaaataaatgatttattgcgcaaagaactacaacaggctgttaataacttgctagaagctgaattgacggcctttctgggctatgatccctatgccagaaatggctggaatactggcaactctagaaatggtgcttatttccgcaaagttgatacgcaatttggcccaattgaagtgcaagtgcctcgggatcgcaacggtcaatttcatcagcacacgctgcctgactacaagcagcactcggatgtcttggaaagcatgattatcaagctttactccaagggcgtgaccaccagggaaatagccgatctaattgaaaagatgtatggcagccattacagtccagctcaggtatcaaatatttccaagcagatgattccaaaggttgaggcttaccacaaacgcaagctaagcgacaagtttttctgcgtctatttggatgcgacataccttcctttgcgccgagaaacatttgagcgtgaagcagtctatattgccattggcatcaagcctaatgggcacaaggaggtcattgactactgcattgcgcctagcgagaacattgaagtctggacagatatgcttcaaaacatgaaatcccgaggcttaaagcaagttgagctttttctttctgatggtgttgttggcatgaaaacagccttggccaggacttatcctaaagctcattttcaacgctgtttggttcatgtcatgcgcaatatctgcgctaaagtacgcgtcgacgatcgtgaaaagatcatgaacgaattcaaacaggtgcatcaacagacaaacaaagaagaagccacagctgtcctgcatgacttctataccaaatggggcaaggtttacagccatgttatcagaagcttgaaagacatagaaccagatctgctggtcttttataactatcccaagcagatcagagcttcaatttattcgactaacatgattgaatcatttaacaatgtgatcaagcgcaaagctaagcctaaagcagagtttccaaatgaacagtcgcttgatacttttattggcattcaagcaatgagctacaacgaacgctatttcaatcgaatccacaaaggctttggtcaggttcaggataccttagaatcctactttgattaaataaaagattaaaaaatcaatctacgagaaaaatctatttacacaaaaaatttgacagtttcacttaaagcatcttgtgttgtttgtacaatttctttaaaagcttctttttcattcaagttttgatatctcattagagactttgtcctacttctaagcgaatgagacatccattttacatttttgtttattaatttatactgtccgttaatcagaagcctttctgcagcatcttcatacttatcttttttcataatttcacccctcacaaactacttatcaaaaaaacagctaaattattactgaagtgggtgacataagaaaaagttaggtctttagtttttaagtacactgcagctaatacacagccacatagtgcatataaaaccgtaaacaaatcaatttgaggttcatgtaagagtccgaaaattaatccattaatgagaatagcaataaataatgttgtttttttgcctggtttactaaaaaaccaattgaaaaaaacacctctaaaaataatttcttcaaaaagtggtccaattgcaatcaacattacattaataattggattcaactgttgctgatgtgtagctatgtttgcttgattagtggcttcccctttaatcaaaaatcctgctaaaatttgcaaaatacaaattactaaaaatccaagaaaagctaaactccaattttttagagtaaatcttggcattctagttttattgtaactagtaaagtgccaatcattcacctgattaagtcttctttggtaaattccgtagatcaagctcagtaatgcaaccgttaatccaaatataaatataacggcaacccagcttaattgtttggctctaatcataaataatccttgaactaccgcataaataaggaaagttactatcatttgaccaataccaattgttttatcaagaatcttttttttcatcttctaattcctttgattttttatgtctgattttagatatcttatagaccagagaaaaatataaattattactgaaataccaaagccagccatcgcaaaattaacattggaatttaaatgcttcgtagaaaacttgcaaattgattgcgccaaagcacctgcattagcagagacaagacatgcaaacacagttgcaataaatagtgctgttcgtcttagaaagaacaaaatcatatttattttcataaactacctctacttagcaaatttctcatcaaaaccaaaatattttctgccattgtatttcttattgggattaggcttaatctccattcgataggtacctttacgaccattgaaagctacaatttgcttttttcctgccgcaattttcttaatctcttcaggggtccaacgatgacctcgatatgttttcttaaaatgatattctttaccgtctttatatgtaatcactacatagacatttgtatctacaggtttaggattaactctaaagccccagaacctgattttacgtctaccttctttcaattcttgttctatcaattttccagtagccgtaaagctttttccttgcttatcagtcgcttcaaaactgatttcttcacctgccaacaagctgataatttcttcctcactaaaagcatgttgtccatattcttttttaaatttaatctctttagctaaaggcttatagattcctttaacgtgatcagtatcttcaggaaactctactttccaaccaactctggtaatctctttacccgtttttttacttttatacgtttgttcggctaaataagccgtatgttgttcttctttaccaaatttttcaatcgaataggtgatttgtttcccttctaaagcttcttgttgctccacttcagtagtcgtatgtccatcaaaaatcgtaactggtgggtttactgtttcatttgtttgagtaaagactccgctaaatctttcaattgcctttaaatcaccagctaattctttaacttgtgcatcttgatttaataatggggcattttctatcataactgctttatcatgttcaattgtcttttctgcaactgagtagaccatatcttgctttgtgggatcagccttaatttcattcaaaatgtcttgcaagcgttttgtaatttttcctgaagacaaataggtatctttagctaagcaagcaatcaatgcgccagttcctgttacttcaaaaacacctcttactacttttaattggggaataacttttttattttctttaccaattgcttgtaatttactaattgtttgcattttagtcgcaccagtacccaagttccatttatccaagttattcaaaatgaaagttaaagtaggtttagttggtggcgtatttgtaccttgatatacttcagggctagcgttttgagcaaaatgtgtagccttattttctgattgcttttcttcatttaaatcattttcgttaaaaatcagcttatagtttagttccttaggaacattaatcgtacttgtaaaatcaggatgatttgcaatatgggctttaacttgagtatatacatagtcctcagctaacattgctagatatgatttaacaactcgttcataaatatctcgaccacatttaccatatttgtcttcaactttttcaagtgattgtggtactaatttggtcggacgattggctccgtgatcctcactcttaattatgaattttttgcgtgggtctttatgacttaagagttttgaatcaattccaacgactgctgcaattttatctgcatatggtagtaactcgttaaaatcatcaatcgtaattgcgttgtcttctgttctcggataagaaacaatcttatcatcatacattttttgataagtatcagtaatttgttcagttgtatattccttttggaaaatcttacctaagtcagccaagttgactaactttggcggctgggttcttttttcagttgtgctatcaataataatttgatcttgagaataattagttaaatcttgacctactagatttttgtctgaaaaacgccaagtatcaccgtcttgatagtcacgcttaaatgtattgccgtttgcatccttataccttatttcatagaaaggctttttaacgtatgattttcttgctctgttttgctcatcaactaagcacgtaatatacgtctgcaagcgtcctattgaaagcgccttacctttattactataaccctgttctcttgccaactcagttgcaattcttgattcttctaatcctgttagaaaatcaaatctctgtcgtgattttccttttactaaaattccttgagcatcttgttcactaactgtagccttctcaggcttatgtaaggaatcaattacatagttagctgagtcatcacctttaaaacgaattcgccagacttcattttgccagtttaaataatctactatttcccaacctaatacatcaccttcaccagatgggtcattatcgcttgcaataataattacatcatgtccaggcaaattactcttaatattatcaatgtatctttgcttggacttaataacttgctttgaccaatttaaatcgagaggattccaaggaaagttatctaaattctgccaatccgcatatttagctgcaaggtttgggtcaaccatttcattaggcgcattgagttgtaataaatgtcctgcggcataaacaatatcatatggatttccttcaaattcgccactcattccacctaaataatccgcaaatttttctgcttgagactttttttcatttaaaataagtaatcttgtcacgttactattcctttctacaaaaaaagaatacctcacggtattctttacatagcatactcattatccaaaaatagattaatggaggcatttatattatatatcatttttgtgatatataaaagactagttaacttggttaatgctttccagaatgactttattcatttgactaatcatctttctaaagtagttgtacaattgttgatcattgttacaattgaggtacttagagtagaaatagaagtcaattcccttgctctctagctttgctttttcttcctgataaatcttgtcactaattacataaccataattttttagataatcttggttaatgtaagtaataaagtcactagcttgatcatgctttagatttttaacatcaaaaccatatctaatcaatttctttttgatcacaatcaaggtatctgatttattaagttgtgctggttgaacgatatcaattacataataggaattggctaagtccttagcataaccttttttattaggtctaacaacgttgaacaatatatcttctaatcttgtgacttctttcataactgcctattatttctccttaccataatataagcatcttatttatatcatatattacatttatagtatacaatattgcactaactaaaaaatgaggcacaagattatattgttatttatatattaagcataaataacatatatgctaattataaacgcgcaaaaaaacagccagctttaaatacaataactttaaagctggctgttttaacataaaattattttttagcgttgttacgaagaaacttaactaatctatgtatgtcttgatcgcttaatctacctatatgtttaacattagtatcttttttagataccgagtaacgtctataagtatcaatccatgaatgtttttttaaacctgtgttttcatattcttttatttcaaaataatgctttttgatttcttcagatttatttttaaactttgtcgttatatcaaagaaaaagaccttatcttcagtttcctgtaatatgaaaattggtcgtcttttaccacctgaaacctgaacaaaacgaacatatgctgtagcaatatttttactcatcttttgatatccattcttgcagtttctcagggctatccagattctccgttgcccaatccttggttaagttttgaatttctagttcatctttctctcgttcagttaaattggttgagaatggtaacccattctcagcaataagacgcttataaaacattgtgatagcaatagtaggtgttaaccccagtttttttagaacagcattaccttcttctaccacaccatcatcaatctgtacttgaattctttttttagtaattgaagccatagtagtgtacctctcatatcatttatactgatattgtactactaaatcaatggaattaaactatataagagtaataattagaaaattatttagtcaccacttgctcagtaagtttcgaaagcttgcacaattttttcattattactccttttttgtataaaaaaagcagttagctttgaatactaactgcttcgcaattattatattttatttcatatttttgatactttctaacgatctaattcctgttcacttttttgaatagcaatttctttggctttttcattagttaacgggctgtttactgtagcaacatatggcttgctagtttgcacttctttatcatcaagcaatttagacttttcttgatttttttcaatttcattttgtaaattgtcggttaacttgctatagttgccatctgctgtccagcactgcgttttattaaatgcatcatccaaatttctaactgtatctactgtcatacttttttcgatttttcttagtgccgtcaattcggtcttaaaattagttccattagtctcattgtcagtaacttcttgctccattttttctttttgcacataccattgcgagtgttcaggagtatctaagaagttttccttgacaatttgacccaatttttcttgttccttttcgagtaacttatcggtactattagttagcgtcttagtagctgaaccaacatgcgtcaaaatttgtccttttaccccacttggtaactcattaaacttttgaccattgcttgtccaattagctatataatcaactgtttcttgcttaacatcaattccataatgagaacaataaagataacttgtaagctccgcctgcatctcttttaattctctaggcaagtccttttcttgtttttggctattatgtagctgtgcatgtcccaattcatgagcaagcactgatacattctccgttggagtgttgtatccatttaacacaatttcgttagtagccctgttaaagtatcctttagcattttgtggatccttatatttatcacgaatatctgcattaaatggatcataagtaatgactggcattttcatgtcattagctacacttcttaatccattctctaaagagtcaatctgtcctggattcttcatattaaaatcttggtgtctattagggtaaagttctgggtatttttcctttggcatattagtttgtggagcatcgaatacagttccaatcttataaaacgtctttgcctgggtttgaatgctaccatctttgattttttgtttttcttcttgggtagcatttcttagccgagtagccgtcttatttccttccttatcttggcggtagaaaactgtagctttagtaggaacaaatattttaattcctttttcacccttgttgaccttatagcccatgcttttaaactttgcaaatgatcccaccgcagtcgcacctgggcgctgcatctgaatcatcattgcatttcttgaggaatagttatgaaacttatccataaaatcaagcatttctacaactttctctggtgactgagtatagttttctatttctgtaagcaacccattttttaaatcttcaactgtttgtgcatgctgttttttccaagtagctttatcaaacttcccctttgttttgtgattatccttctctttttctttctcgtttgatggctgattagctttttcagagatttgtctttcaacatcttttggcaaaagacttacatttgacgcagcaagcctgttatctctagttgcatcataaagttcattaaagtatttaatttgcttttctgttaattgactctcaagctttttaagattcgtactttccgtatgatctttactgtaattatctgaataggcattatcgagagcttcatttcttgctttgtcattttgcaaataccattttgcagataatgagtcagatgtaaaaactttagcagcttctttaatcacttcttgcttttcctctttatcttgagtgttcattttgaaaactttaccaaagtacttttgataagattctaaagctttattttgtttatccagtccttcattaagtccttttttctcttcgtttgttaacggagctgcccagtcagaagtaacactagacttattccaattcacatcggctaaaactccactttctttttcactatcaatgactttttgagttaggagcttaattccatttcgattgatcatgtgccattgatatgttccttcagcatttggtgaaaaaagataatgatactctacatctgaattaaggtacttaccgtcattctttgatatatcattaatcatcgcagataagtcatgatagttttttctagcaggatcatcgattctttgtccattagaattatattcatccataagcttagtagcagctgtaggatcttctggaatatgattatcgttatagctccctgtttcaattaatttctttgcatcgtctaaggtacgatagttatcgagcaaattttgtcctgtaaaagttagcccaccatccatgtgaaagtactgagtagtaatagaaccatctagatttaaaattgaaacgtttgaacgtgttgacatattttttcctttctaatacaaaaaaagacgcttcataatgaagtgtctcgactacatataatatttagtttttactactatcaccttctttctagtgattctttacttttcttcttatctttctaatccttggtctctcattcttcggagggctatttctcttgctcttggatcaattttaaccgacaattttttagcactccccttttctttatttaattcgggaacttttttttgtttctccatttcagtagaagacatcaagtgcttactaaccaccatacctagcgacattgcgtctaatggggtctttatatactcgtgattaatggcaatagattctacacctctacccaaatctatttttctttttttagcattttcatttaaatactccacttggtctttactgtcttgaaaaacacctaatatagtattctctgggacatccataagttgatcttttaaatcaccactatttagattcatcaatgaagcaggaattgtaccatccttatcactatctctcagtaataccattaaatttttatctgaactttctatactgctatctaaatttaatttacggatacgctcaacattagaaaaatcctttaatataaaactgtctggctgcaacagcttagaagccgagtttaaagcttgcattttaaggaacgttgttttgtcattctttagcaagacagcattaggaattttattatttagaatatctgataaaatctgatttggttttcttctatcaaaacgtaatcctaataaatgtggaaaattctctttaccaaagtttacagataacaggcttaaagcatgattatctttaaaaacataatctattgttttgctagcaagtttttcattataaaatgtagcaaagttgttaatattatctatgtacaagtcattgatcatacttgcttctttttctcgcataatatgatatccatgaggtatatatttaacctgtttatctaaagtttgttctattttcttcactttttttctcctttacgttacaattacactaatagaagaagcaatttttaaattaaggttttgaattttcaattcgggtggctcactgccttgtcatatgactaaagaaagcgtagtgcattgcttttcaaaaagccctcattgagggcttttcttttacacttttctagaagttgtctctacataatttaaatagcctatttctactaaattccttttagttactaaagagctgcacatacggaaagcggtatgtgcttctttttttgcaaaaatttagcagttagtctttgactagctgctttttctcattattcatctttctaattcctgtcctcttctcaaataagccgcacgtttttctaattcttgctgtggtaatgttctggttgtatgcttagatttttgttttccttgttgcattttccgaaaagcttttaagatatcattccaatctttacctaatttttcactaggtttacagtatttaactttagaaaatttagattgaatctctttaacaaatctttttcctgcttcatcattatctacgcctaaagcaactgttttaagagtgcgcccttctttttgcaattgctctgcggtttttgttatataggagttaaacacctctttctttagtccatccattgaaacaaatcttgtatttttcattcctccttttactttcactttagataagtcaaagaagctaattgcatcaattggtgattcaaagaatctaatattttctggagtttttccactcatacctggcgaatcaaacgaaaaaccatatcccttagtagaatctttctctatcattttgagagttcctcttctaccatatttttgataattaattctggtcccttgttttgatatacccttaaccttttgtctgtctttaggatcaagccacaaaaaaagtgcattgccaaatttatcttgtgcaagcaccttatctttatgtaattgatctattgtctgactcgaaattccacgctgattatgtaaatatccccaaacacgattgattttgttttcggagtctaattgatttttatcaaacttgaaaggctcttttttgatctgataaactttaccatctcctgcaccgctagttaatactttatccattgccttaagaaatttttctttttcatttaaattgctatcagacaattcatataatgtagaaaaacttaatgcaccctttccatgaacctgtcttgaattccaataaaatgaattcttagatggtgtgataaccaatgaatcatgttccactcctttaaattcatcactacctgtttgtcgtaaagcaattcctgcacttcttgcatattcaacaatacttgcagaatttgctgctttaatttgttcttttgtaaaagcaagcattttaatttctcctatctttacccataaaaaaacaagtagtaaaactacttgtcaatctcccacctatacccgactaatatttttagtcaataattaagatgatcttattctaattcttgctcaacttcattttgtaatttttcaaactcacgtaagttctttttagtttctttatctgcgttaattttttcaaatactttttcttgatttgattttatttttcggatttgactttgattaatgaaaggtttttttaagtaattatgtcttttgaaagactttttaatctttagacgcagatgtggtgtatatgaatcatctgactttgacctttgttctgccgcatctttacgaatctcttttaatgcagattgaatgtagtcatttggatcaactttttctttaaagctaactctatgacgctgattatggttcgcttgtttatctattttccttaaatctgacaacaaagcattgccatttctggcataaataccttctttgccatacagttggttgattgcataatttttattttcacgtttacttttaccatataaagcttgtcggtcatcttgcattttccaaactaaatctttatatttctgaaaatcagaattatcctttagtaattcatcaaccaaatgattcgacattttttgttggcgtttatctaatttgttataaaaccattctcttcttgactcaggcaaaactctaacaaactgatttatttctgcctgaaaagttggctgttcaacttgactagtcaaattaatttgaatcgcttctctaattgcttgacgtttttgagatagctccttagtcatttcagctgaaccaatcagttcatttgcaaaaccacttttcatatgatcaattattttttgtggtcgcctacccttaggttgactaatcccttcacggtttataatctttcttcttgggtctttctcaactgttgcaatgtgaatatgaacattatcagtatttctatgaatggaagccacccagtacatttcatttaatggtggatccatttccttttgaaaaatactctgcatttttttagttgccttttgcagttcttcctcatttaatattccagttgtactagataaaatccccttcttttttaaaaaactattatcaaaactaacaacatcttgccacaagacagaattattctcttgtcctttatttaattgctcacgaatataatctaaatctttcaactgaacaatatctttgtcagagctaaatactccatctaaaactttttctttggttggatgaatttcactcagcttacttgcagcttgccctattctttccaattcagtttgttctttaacatttaatcccgttttgttctttttctgattcaacgcatcgattcgtaccatatatccaaggtatttatcaaattctttatcattcaaatcaaaaaaatttttcttctccattaacttctcagcagctgcttctcgttcagaatgttcttcactttttactctagtaaagttgttttcctgatttaattttcttacttgttttttaactcgacttaattcatctttttcttctgcagttaaaaattctttttcttctaatgcttcttttctggctatatatccaacgtaacgtccaaaagcttttcgtgaactcggcacagaaaattttgaagttaaaattatagctggtcgtcccaaaaattacctcctacaaataaaaattctataaagcaagttgattaataattattttgctctttcaattttaaaagccgtagaatcgcaatctcagcatcaaaacttactcaagttgtccgccattttcctccattctattattaattctttcttttacttttctctttgcagatttataaacttctgcatcaattccatttccgacaatttgcattccttgagtcatcaaaaactcacttaccatttctgttagaattgcaacttgttctttggtaaatcgctgttgttttctaatatcacttaaatcttttgtccacttagaatttttttcattttcttctgctaacttcataagatgatgaattacttcagcattattttttaaatcgtgttcctctttataatcttgaatccaatctaaatctgtatcagaaattgtcgctctaaaagttgtcttaatcattttttctggtcctcttaatcagcgtaagtttcttgtctttttttcaaagcattatcaatcttttgattaattttttgtaactcttccagttctttttctttttgaacacctaacatggcattgaagaataagaacttataaagttgaccattattatcaaagcaatgttcttttctaatctgcctaatttcttcccattgcttatcgttgagtcgaaattgcaaaaagtgctgtcgtcccatttcttgccctctttctaaatttaatcatcttcttttgccgtgtcttctgacaaactatctaacaaatttaatgctcgttcggtgtcattaacatctccactaatgaaatactttgcaagaacattcagccctaataaattttcctgcagaagtttattctgcttctgaatcaataaactagtttgcgaatcttcattttgattttgaaaattaattggaatttgttcaatttgttctctcaaaaattgatttctggaaattttcttacttgaattttgatttaattgattaacaatccgatcaattctagccaagttttgttcgctgattccacggattaaaacttttaccataatttttctttcctctgatttctagtttctagttttccttctagtttctactctgaaatttgactaaaatctgcttcttttagttatctctagtaaagagcataagggaaatctgaccccacgccttttataaaggtgtgctgggcttggttgtaccaagcgatttcgcatttttagaagtgatatcacttctgattaatttgacgtctgtatacttctaaattgttcgtcttttacctgacattacgtcttgatacgtaatgttttttagtgatatccgaacaggacgtattcttacgtagctcattacgtccaagacgtaacattttttagctaaattttgcacctaattatcaaaatcaccgtccttaatgtctctgattgtgtcttcatatttagaaattgcttgctgactttgtgtgatagctgctttgttttctgaaatatcattttccaaactactaatttgtgtttggtaattttctttttgactatcaccaactttttctaactttgcctttgcagaatctaaattattttgagaattttgaatcgtagcttgagcatccttaattgtattttgttcttgactaatcttctttttattccaattaatcagatattgacgataatcaaggatatagttttgatagctcttagttactttgcttgaagtcagatcaaccttattctctttaatgaagaactcaatataattattttcagagaaatcttgcatgttaactcgcttattaactttttgtggcagaatatcaacctttaaatctccaaagccatttttgattccgctaacctcaattactaaaaagtgattattgattttctgtgatttgatcgcaagctcttctccatcttctccgccacgtgacatgtttactactcttatagcatactttaagttgcttaagtctgaatcgtcactagtagatgttacgtctgtagagtccccaagataatactctagcaacatcttttcgctttgcttattgtaaatagaatttgctaggtaaaatgatgaattgcctgtcactacattaacagtttgctcagtgtcaattgattttcctgtccaatagggactagcaacgattgcaataaaaattgcagccaccactccaatgaatgataaataaattttgcgatacttatgtttttggtgtcgcttcaattcatttttgtttttgctttgaatcattttttgcctttctaattgtcatccgaatgtacacgatagtttttgctatcatttaattcctgttttaattcagtaatctgctcctgttgatctcgaatttgtctttgactttctgaatctggattatcacgattaaagtaaactgttgccattagttgtgctgctgataacaaaaacaaaactaaggcaactaatttcaaacgatgatttgatttttttagtttagttttttctgattgatatacaattcgactagacatttttaatcacctcttatgacctgatctatcttttctatgttagttcccgtatatttttctacttgttttccatactttaaatggataaaagttggtaccttagttaacttatactccgtaatatagtgtcggttttgtggttgattagtatttacaaactgtatattctttctaaataaatcttttttcattacagcgtatgaaaaaatagaacgacagcttttgcagtcatctcgataaaataaaactgttgagtcatcattagttttgattttaacgatgtttttttgatttagttcatgattaacatgttgattaaaaccaataactcctatgaacaacaaaaaaatcattgcacaactaactgcaatgatttttaccttagtttcttttttcggttgcatcttaatctgcctcacgatcaatttgatagcgaccaaaatacttaattgaagtaatttgattagtcgctgtatcataaatcagctggtaagcatcagttggtgttcccaaagttctatcatcttttgtcatttcaaaataaactttggcatatacaggcacttggttattttctaaaatacctgtcttcaaatctagttcatcaatctgacctgtcatatctgccccactatattggagctctaattgcttatcatttttaaacatagaattgttctttaagactttttcacttactaaatgtgtatctttcaccttgtctggtatttttaatttttcatcaccactatcatacgtgtaaagcagttttagcagtttacttacctgtttcttggcttttgtctgtgctacatcctgctcagctagtttctctttgctgcctccttccttcatagcaatatgcttttgcgaatttccaattttagcatctacattttttaactcatcttgctttttagccaactcagttcttgcctgatcaacatgatagtcgatagctttttgcttgttagtctcataattgattacgcctaattcgagcatgattccgaggattgctccacctaaaagatattttttattcatcttagttcctctctatgttgatttctttaaagctatttattctttgggtcttaagattataatcaaagtcccaaccataagtaacttcttttttattggcactttcgactagggttactactgtaatcttagtatgacttacatctgttaagtcaccaaagtaaaccgttgtactcttgtttcttaaataaccataagaatctccattatttttgatgaagtttttgccctctttacctggaaaaatttttgtccaagcactaaattcttctttttgtttagctgacgaaaattttcttttagtatagatagctggtatcacttttagaaacttgtcacgtgcctcttcttctgcactcaccacatcaaacttttgtttatatgcagaattctttgtttgactattttgctcttgaactatttgcttctcaacagttttaatttctgccctaatatcattcagttcatcatttttaggaactctggcaattgcaaacattcccagaacagcgaataatactccagctgtcatcatccatactttcagattggactctcgctcctttttctgctgcttcatctttatccttctttcttggcattaataccaggtatgtttcatccagaatttttgtgcattacgccatgaaccatatctgccttttacatatttatttgctacccttgtttgattcttatgactgtaatcaccattaagatattctctctttaattgataacgtccataaacacttgggttagctgggttaactgcgtcccatctacctccagattctctctgaacaatccagtcacgtgcttcagattcagtttttgataagccatcatcttcttcagattctgcatcattgttcaaaccatctttaattaatttaattgggtctttccaagtaccatcatctttgtacgcagagagctctgcggtagcaaaatctttttcagttgcaccaatgtgaacgtgagtaataccatgtgcattacttgctaagtgacctattttatctcctactgaaactttgtcgcctacctctaccttgacgtatttcaaatctgcttcatcaaagccgaattcctgataaatgacattccaaccgtcggagccttctacccaaacgtacattcctagaccatcttgagtatgtccttgaaatgcaattttcttaacggttccaccatgaattgccaaaatatcttgtccaccatatggaacagtaccaaagtcaacaccatcatgaaagccacctgttcttgtagatgacttaccaaataattgctcacctgagattgtattacctggtccttttttaggaattgacttgaatggccacccccatttgccgcttattggcttacaatcttcctcagctgaattatctgagccactagacccatcacctttagctagtgatttattgcctttcaaggcatcatattttttagcttgagcttccatacctgcttggtaatcactttcagctgcggtatagtatcctgcttttttcattgcatgagcatattgagcaactgtagcatcttttcctaatccagcttttttaaaaccattctgaaccgtcacagcccactcggtcgcaaaatcacttaagttcttgtagtgaacgtaattaccaccttcactaccacggctttcacctttggtaccgatagtgcttccttctgaataagtcataccaccaaagttatgatcatgtttagcaactgaactatcaccattacctgtttcctgtcccatttgagcaaaaagtaatctagcactaatcccagttttctcatgcacagcatccgctatatgcatcatagcggtctgtccatacttaggtgattcaatgacactaattcgtccttctactactcctccttgttctcctcctgtatcacattcatcatctgtagcagctcccattgctgcaattaaaattacaataaaatatataactgataaaacagctaaaattcctaataaaaaagcggctaatccagcccatctttttgtctgtcttaaccgcttaatacctgttatcattattgaccacctgcaaaaatttcaagttgtcgttcagatggtttcatcttgacttgatatctttctcttcctcccatcgtgacaattgcttgtcctgtttgcaagtcaggaatgttactgtaatctgaactatttaatgcttcgcctaatagacttttgattttcttaagttgagatggatccatactcattagccatttgtattggcaaagttcaaaaaccacttttaaacttgatagttgagcagattctactgaatcaggaaccatttcttcgggtgattgtgtcgcaaatataatacctgcattaaactttctcatttctcgttcgaagtttttaacataatcaaccgcaaaaatattttcataatttatgatgttatgacattcatccaggaacacatcaaaatactgtacatcttgacgtgtgattttccctgcctttaacagagcattctgttttctaccatttatcaatgcatgactccaaattaaacttagagccatatacaattgtgcctgataaacattttgattcattgttgaaatagcagaagaatcaaatagtagaagcttagtatctgtcaaatctctcattgtagaataaccatcaaataattgaccgtaattctcaatcattgattccaatgctaccttgattttttcataagttcttattctttcagcagtaaattgatgttgttgatagtacattggcgtagccaatttttttagccaatttaaaaactgactaaaagtcgggtatttttcactatctaaattagtaatttttatatttcctttattttgttgaaaatttctaggtaataatcccatgtctacataaaatccacgtaacaatgaatcaaattcttgcatttcaatatttacaaaggatcccttattaatcatttggaatagaatatctaccttagaaatatgttggtaaaaacttgctagctcatcaaccttacctgtattttcatctacagtagttgccattacttcaagtggattaatcataccttctgatccatccaagctaaccacggttccaccataatgcttaattaaaggaatatattccttagtcttatcaattccacgaaagtacatatttctagcaattgtaccttcaaccaacatcttcattaaagttgatttaccagcacccatcttacccaagatcatcatattaaacgatcttctgatattagttgatctaaattgatcaaaataaaaggctcccccagttgaagtacgacctaaccagactcctctagggtcctttaagctttgagctgaaaatgggtcaccagctccaaccgttaaggctggaattggttgttctggcaatgctgctaaatccttttcttgctctgtgattggtaatgccattgatttaaactgtttatcttgcataaacatataaacagcaacgttataaccctcgcctcgaagcttgccacgaagattagaaactgattgatctaatgcttcaatcgttggagcatatacaaagattctggttagcattaatttgggaatttcgccaccttgacttaattccaatgcatatttttccaatgattgcatatctttttgtgcatttaaagcatcagtggcttttctagcattaacttgccggtcagctaattcttcaattgatctattcaattgccgcttaatttcatagcccgaatcagttttaacgtcaattgtagttaatgttgaatcgtttaatgacacttgagtaagccagagcaaaagcggatcattaggataatggattacagataaacaagcagcatatccatcacttgcaattgcataattatccgcaaaagtaataccgccctgcggttgtacttctgctagaaacttagtattgtaaccattttttagtaattctctttgctttttcaagctggtaacttgtcttggatttagctttacagttacctttttcttcttgtgtctctttgttttcaataaactagaaattctcattttttctcccttacttactattcaagttgttttctctaaagagtactttaaccgtttcttcatagtccaatggtctcaagcccattaacccttgatcagcaaattgagcggttctagtgttaactctaatatcgtgcaaatcttctccaaaaatcataatgtaaaactgcacatcagagtaatcttctgtatttcttgacagcattactgattgcaacaacatttcattaactaatcgtaaacgcattttttcatatctggttttgggtgaacgaatcccattctttaaatggcgaaaatactgttgttgttcactagtatcaattctcgtcgacatgactacaattttataatcgttgctataaatccgattaaatgtagtaaatgaatctaggtatttacttctggtttcatcatcaagtgaatataaatctgtcgaatgtacacgcaaatagcgtgcttgggtgccatctactaaatcaagtatcccgtcttttgagcagttactatagcccaagtattcaactattgattgatctcttgcatcttgtcttgatcctttatctaagccaaaagctctaaacaagctaggagctttgctcctactgtttctactttttctttttgttcgcattattttctccttctaaaaataatggataatatctgctttggtcttgtcgcataatgcttaacaaaacacgataatttctaatctttggcgctagaggggttcgcattactagcagaattcctactacaactccaaaacctgtcattactaattgccaagtcggttgtaaattaaatagaaaagaaatttgttgtcctgccatacccccaatgaaaagagcaaaaacatcaaacatatctaggaaaaagatttggatagatacattagttgacttaggaatcattattttttgatatttatccatgcactaatcctttcttctgctatctccatgacctaatttgccaacgttggtagaacttggtgatttagtctcagtagagttttcaacttgctgattgattgtggtcttatcatgcttaatttcagtcaccgtgttggtattgccttgagtttcaacggttctattagtgtttgaaggtacgctgctcttcatagcatcattcacactactcattccttgattgcctacatcatgagtagatacttcagttctgccagcctttctttcaatatctacatggttggtaccagcagtttcagttactttactatgactgtcttgtcccttaaagtctgaaacattgcttaagtgtctaccgccttcaccaactggttttggcggtgtggtttgttgatttgaacggtgttgacttgctaacttactagtggatttttgagtatctctcaagcttggtaattcatcgatcgcattactacttgttggtgagcttgaagagctatttgcttcaccacgctttgaacctgaaccagtaactgaagcactgttagttctaggatcatttgctgtttcttttttaccagtctttgaaccattcgttgcttcaccaactgtggtatttggaatttttgcatcattaccagttgtcttagctccacctgttgacttaatagagccgtcagttgaactttccttagcagcatttgatttaggcttgctatcatcggtcttaaagccttggttttgaatattatcaggtttaactgatgtattcttaccttggtcatttacatttttagctgaatcaacattgcttgttgcaactgtttctttcttgccatcatagtttggatttcctacaaatgaagtatcacgtccaatacctgttggttctgcactgccaccattcttttcagctctgttttgcatatatggattatgatgtaaagtgttgtactgattatcagttaaaccaccatttctcatcattctagcggcttcatcttgtacagtttcagatacagcgccagaatttactgccctattccaatcaactgcactgccaccattttgcttaaagtcgttatgagctgaacgaaaggctcttcttgcataactgccagcttgttttgcttcactattgcttgctccattttctttagcaatagccttagtagagctaccagtttgccaagcttgagcttcaccaatcgctgcccctgctaacttaccagaacctctggcaactccaacagcgcctttagctgaatttttacctttaccagcaatatattcagttgctgcaatttctccagcaactttactccagccttgcttaagtccagtatccaaaccaaagaatttttgaaccttgcttgaaccttcccaaagtgcccaagttaaagcaatcattccaactgcatatagataagaattatcatgaatctttcctgcatctgatgaactcatccacacagctataattctatagaacgctaattcaaagccttggaatgcaattaacaacgctgaactaaaaatatcttgtaccgcagctttagtacgctttccagtttctaaatcagtggagaaaataatgattgataatacttgcataattgccaattccaagaatgctcttactgaaacaaagcaaactagtaagaaggcaactgtcattgaaagtaaggcaactacaactgggaagaattgtactgaatatcgttcatatccaccgttaaaaattttgaaaaaggcagtattgctttgacttactttggttgcataatatcctgaatatgcttttccctttacatttgatttcgtaccaacgcctgtaggagctaatttataacgcaaattgtcagggtcccatgctggtttttccttagatttatttgctttattacttaattttttagctaaatcagctgaaatagtagttgataaatcgcctgatgttgcggtatcaaaatcagacttgttcatagcaaatgaaccatagtgaacatctttttgtctctggtctttaatttcaccatttttatctttagaaacaccttcccatttggtattagtatccccattattgattttgaagccactaaaattattagctatgattgctaataggtcattagaattagcttgtactacctgatacggcaagcttgacgtccctttatcattatcagcctgtacaaagcctttatatacacctgtagactgatctaccacccaatttgtaattggctgaatatttccgattaagaacgctgaaattgctaattgccaaacgacattttttaattgaggagctttacttgaggtaccaattttaattccgacccaagttaaggttaaaatcatcaaccctgcagcaattcccattaccccattaattaaattagtatttaatcctgtggattttaagattcctgagaaatccaaactatctgttgctagttcacttgcccaattggcaaatccataaaagatcttaactatgccccattttgtctgattcaaaatacgtcccaaaaaatcatcataatgtaaataaggtgccgcattttgtagagcttcagttactttttgtaatttggctggatcataatcacctgaattggttgatttttgccaccaatctaccaaactactaaaaatatcaagatacttaggattgatgaaactagttaaatagaataaccaatttgtcattaatttttcctttctttaaacaaaaagataagtagtccttatcgctacttatcttgataatattcattaaagctttggctaaattcctgtgttaactcattcttttccttgttcttatcttctaattttttatctttatagatgatattaacaaaagctattgaacttggtttttgtccttcaggcacatcttttaattttatagcctcgttcaatattgcttgttttgttccatcactaatatcaccatcatgttccgttaaccagttcgtgataaatggtggaatctgattttcttcttcctttaaagacttcttcatttcttgttcttctttagcatctttagtagttgcttgaacatttgcgtcactttgacgatattggttatacgcctgcaaagccaaattttcttcttctactactgcatttccatcttcatcttgtttggtaacttgttcagtccaagttaaccatttgctccaatcgatttctaatgcttttaaattaatattggcgtgtgcatcaatcttttcaactaaatctggattagttttaggattaaagtcatcagttaagaatgtatgtgcaaacggcattaatgtttttcctgtgttaaaaataggatgtgaaactaccgcccagccccatttattcattcttgttaaaggtctcaaaactaatctttcaccgccagctaaatgttctaatcgttctggtagtatcaacggtactttatctacgctaacactaacatttttggctaaaccattttgatctttagaaatattgcttgtctcaatcgttttattgccacaagcttctgaaaattctttgttagtagctgaatcagtagacataatcaaacatttattctgacaattttctttaataacttgtccgtcttctttgccatacttactgtagagctgggcataagactggataactaaagtaaatagaatattacgacctgctgaaactgtcataatccgatccatattctgcagcggaatcatactaccaaactcatcaaaaatacattgtactcgtctaattgtctttccaccttgaaccagccgacactgacgtgataattctgtatataattgattaacaaaaattgtagctagcaagttgtttgaagcatctgaatctggaattttcataaagactgcaattggcttatcactataatgcatcttaaagttttccatcttaatttcaggttttcctacctgacttacttcaacctttttaactttaggattaatctttaacttaaaagtattcttcaaacgcttatgtcctgcaatagcttcaatttcaacaaagcttcctgtttttagattgacatcaaagttgttttcaacaaatcctttttgactaacacgaatctcattcgttttcagttttttattatgattatctctaaaattgattttaattaactcaccatatagtcgttgatcaagcaactgaaactccaaatattttggaaaaccaattgatttcatttctagtgtgttcatactggtcatgcgtgagtttttcggtaaagtgaaaatatctagtttctgtacaacagttgaaaaaattgagcctcttgccttatcatctgagaaatttgtggaaccgaattcttttttagcaatagatccctgttccaaatgcttaaagtattcacttaaaacgttgtgttgagtatatggatctgatggattagtataatctatctgtcctaactgattaactaaatcagcgatatttacaaaagtaatatattctggatgggcttttttatctctaaagtttttaggattcatgcaatactcaatcaaagcaataatcataccattaacagctgattgtgcgccgtcattaacccacttgttttgacctgcttgtttatcaaaataaagcgagtaggtaattgagttaactaattgcattgctccttcaacatcaccctgctcccaacttctaataattaactgtagcggattaaatgcaattcctttgtttgggtcatctaaatttaattcataaacatcatagccacgcttcctcaacgtatttacagaagcaacatacagttctcctttaggatcattcacgactagtgacgattgtttttcagccctacttactaggtcgatttgttctaatatagtagtttcacctttaccagaccgtgaagtaccaacaatcaaattatgaactgtacttgtatcaatgaaataatagccatgtttagtaataaatggaaatttttgggttaatcctaatctattaatgtgagcaatggggaacccaccaaaacctttaaagctaggctttttaggatctaaccctggttgactatgatcaggaacttttacataggtgtcttctaattccttaactgtagtaaaacgggcatttcccttttgcccatgagcgactttttgactttcaaagtggaatttttgacttaacaatccaccaataattacgctagcagcaaatacctctaaaatttccatgggcttcaactgtgtcttaaagaaattcaagccagctaatcccgctttatctaaatcgagaccattcgtgaataagttatagtttttacttttagtttgtaacatgacattatggaatgctcctaataaccacattattactagaaagataaaaattcctataaccaacgttgttatcagcttcgtataattaaaattaatattgctagactgcttgttttcatttttgggacgatgtaattgtctttcaacttgatacaagcccttttttacaagattcttttccttgtttctagcattttttagatttattcgtgatcttctttttttagtacgcatatctagctaaccacccatcttgccaatcagcaatatcatagaaagccaatgcgacagcttttttagctgagttggaaatttctgttcgctgatcatcagttaaacttagccaaatatcccttgtctgagctttgtcttcattagcaatggcactgtacaaactagcaattggatttgaatatattgtagcaatcttctttaaatttcttgcatcaccttgccctaataaaccatctagcatatctctcttttgtgcccaagtcttagtttcacgatattgttttaaaacagcttgtgacctagttaaatgggttggagtagatttagtctttgatttagcattaggttttttatttttagcaatatcttcattagctgattttttatcagattgcttactacttgattgcttgtttttcttgacatgcgagtttgaacttgatcgttcaattgaagctttttgttcattattagaatggttattagtataagcccatgtaccacccaaagccgcagctgcaaggcaaactaatgagataatttcagatttatagtgacgtttcttaggactgttatcctcggtttctggctttaactctgaatcttcttcatttgattcagaatcaattggtgcatcatttttcttagtatcatctaagtctactacttcaccatcaacatgtggcacaggcactaaagcattctttccatcattatttaaagtaatttttacgttaggattttctaaattattttgagtaattgctgcagcaattgctttcgcaaattcctcaggcaactttgccatattttcttgttgcaattttgccaaagactcattctgctcaattgctttttgctttaaatcaagttcacgttctttgcgagcagcttctgcttctcgctgacgcttttcttcagccttttcttgatcaagtagcttttgttgatttatttgttctttagctaatcgaactttttcttgaaccttctttaaattgtcttcaaataaatcattattcttgtcatagttatttctaactgcatgatcaaaatcattactaatggttgttctactatcatctaactcagaatttcgtttttgtacttcttcatcacgcgcaacacgttctactttagctttatcagcctttaattgctcatcaatttgttcattagcattacgagttttaagttcttcttgatcattaaaattttttagagctaaatttcgtttctcttctaattgtttcttatactcagctaatgcggcttcatcattagtctttagttctagtgccttgttttcttttaatttactcaagtcagattgattattttgcttttgatgagttgctttaactgccagttgttgaatctgtgccgctgttctgtcttcaacaattttatctagtgactctttagtaactctgttatatgcttcctttaatctatctacaattgcagcctttgatttcgctaaaccttcatcatatacacgttgaatatcttgcattgaataatctcttaacgcctgatcaattttatcattcaacgcttgatcatattgatctttaggattatctaaatagcctaaatcatgacgaatattatttagagcaaattgatttttatcatatcctcttggcaaacggtcaagaatatcattggcatcggtatatttgccatagctaattacttcactgcgactagtttctgtttcagttgtttgacctgcttgaattggtaaagcatcaacctcttcaggtaattgtgtaggaacattattcaaactaggattggttgcggcattactatttgattcttctgttggactgttatcctcagtctcatcatttacatcattttcaggaggtatttcatcacgcacttcatcatctgaatctagaatttgattattattaaacatgaacccattgtctttatttaagtcctcttcatcatcactcaaactaggttcaagttcattaaagatttgatcctttagtgttgttactgtttcttcttgatcacgagttaaattttcattctctaaatcacgatcaatcaagtttaaaatacccccgtcttgatcctcaggtaaaatttgtgcttcaaagctgctctcttcacgatcctcatcttcatcatcaaagatagtaaatgtaacattagaatcagctttttctaagctctttgcatagtccttaactgcatcatctgcagttttaatgtctaattcaggcgattttctacttaatttatgcttaaattgaaaatattttttcgccccttttggtaccttatcaaaggtaactaatagcataatcttctctccttctttaacgcccaccatcaacccagtaagttaaacttacttcaccttacttacaaaactaactatctagcattccaaccaaacatatttgcgaatgatggtactaaacttgcagctaaagcaacaatggcaacacctaccagtgcatacatcaataattgctttgcattttgcgacattctgttaccaaaagcgaaaagaataccagccaagataataacaacaatgaacagacctttggcgatactcttcaggttcttttcggtactaccagtagccttattaatattgctccaaacactaagtaaaactggatgttcgtttaaaaaagcctgagtaccaattaagccgctccaaaataagtaggtcaatttggtataaacagctaaaaacattgttaatcctccttgtataaaaaaagcatttagttagctaaactaaatacttttacttgtcccattaaaatcacttgtaggcttattatcatcttttgatgacgtaaccttatcatttaaagtcttatcaggttcagcaatctgcaatttttctaactgttctgataattcttttttacctgcgacttctaaaactgcatctttatatgcgcttttagtgcctgagatcaaatcttgcacaaactcaaccataattttttcttcccaagccttttgtgttaagccttgggaattatgtagcttgcgtaaaatggacttgtcttgtttgctaagaaccatttttcctccttaactattgcccaccatctcacccgaaagaaaaagaaggattagactttctcaccatttcatctaatcctttatacgttattcgtctttgttacctggtaatgtttcagtttcacgcttgttgtctttatcagtgtttttattcttgtccccatctcctgttgggtcaacatcttcactggtatagtcgcctgaaacctcgatcttcttatctgcagaagcctttggtgtctttggcgatacgtgagtaatattacttggaatatcttccttgttgaacaagaagtgtgcttgatttggtacttcaatttgtccattatccttgttcaggtagtcaagcaatttaggagtattgattaaagtagtatcaatgaacatcttcaagtgcttaccatgccatttaccaggctcggttgctacccacgaaatcttaccagtcttattattaacgtctaatttaccttgatcagtaatttcttttgctttaccagcactatctttgtcgtcatagtcataaaccttaacgctcttaatgttttgaacgtctgcttcgatagcatccttaattgcaagagaatcaacattcacattatctggtacagtagcttctacgcggtaggtatatttcttgccaaagtctacatctctaagtgacttagaatcggctaatccatcttctgaaacaaacttttcatcctttggattagtaaatggaatattagtagttacttgattagaatctgcactaccattatcttgaattactttggcttcattgtaaattacagcttgatctttatgttttggatctgcgtgatcctttaagctctcaccacgctttacagttgcatcaaaggtaatcttgtaagtttcattgtagaagtcatccattgccaaagcatcagattttgcaattactgataagttattacctgaggataaggttactgtgaaattgtaagtaacatcttgatttgcacggttataaactctaattgagcctgtatcaatattcagaatattatctaaattatcagtgattctatattctgtatattttaaacgcttttcaacatctggtacagaatgtgtaatttgatagtgatattgttcatagcggttatcaagcatatcatgagttactgatttaattccaccgacttcactaggtgtatcagttccttcatccttgtcagaaacatatttattaggattcattggtttatcttttacaattggcatatcaaacaatcttaggtaagcatggttaaaagtaccattccagatactatttgaaatagaaaccttatccttatcagtcattccagcatcaggatcatatttaccttggttcaattgccaattatcagtatctgcttcaatttctgtttggttttcagctgcatgttttcctgttgtagtaccaaaaacccaatacatattaatatggtctgtgtttgacattgttgctgtatatgcagccttccaatctgaggatcttacagtacctgaaccatcaggtaaagcggtatggtgttgattggcatctgaaaagatgtaattattgcctaaagtatttttataacttaaccaagtattaccatccttttgtccatcgccccaaataacttggtcaatcttaccataagttgatgtatcatagcctacccattggttaccatcaatatcacgtacactttgatttaagttcaacttcaaaggtttacctgtatcatgatcaataaaatcaattctataagcaaccgcaccttgtccaggtgtgaaaacttcaaaatatggacttacaccaaaggcaattgttggattctttaatggaactttttcacgtttaccatcagatgtatcctgccatttgtaggattgaatattccaatctgttgcggtgattttgacatcaatagtttttccgctgttaggatcaacaccagtgtttgaataataaacaccaattttcccagctaatttttcatttcccataacagagaatgcataccaagagtgatgtttgtcttcagtattagtacttgaagtagcccaatcttgtgacgcaccaccaaaggcatggattttagttacaccctgaataatcttgggaataaaggcatatgaacctgccatttttgttccaactgcgttttgtcctttcggcaaatttaccatttctgcattatccgcatgtacaatgcctgatctagtagcaagaaatgtgcccagactaaagccagtagccattagtgcaattgcggctaagctgactactttgtttttcttcgttagagaaatcatataatttcctttcttttgagtaacaaaaaaagaagagccgtttttatttgtactcttctttatacttaattattaaattagattatttagttagcattattccaagcactaacccattctgggcttgtaccatctgcagtaaagaatgaaattcctacactactaccttctccatcccaataataatgcatgcttaatgctgcatatgcattatgctttttccaaccatataaaactcttggctcgattccttcactatttttcatcatatcaaataatttatcagcgacttgaactggtttccaacctttatgagtaaaatctccaccaattacaaagcctttatgattcaaaccataaatagttgaatctacatagccaacagcttgatccatacctaactttgttaagcctggaagatatgctcttatttcattaatattttggctaattgtatcagaaaatctactaaattctctagtaccaggtatttgtgcttgttgtgctaaattagtcaattctgaactagtcttgaatgctggataacctttagatacacggtaattttgaatatcttgccataaacgatcttcaatttgttgaacctccgtatcagtaaagtatacatatacattcattttctttctagctaatttttctgattctgcagtcattggaccatctacaagtgaactcttcttagtgttatatcttacaccagaatcatcactattagtatttataccagatgacttagatgaagaactagatttcgaagtagtagatgatgtacttgtttttgcatgtacactattacttgttggaaattctcccttagtactggattttgtaaatccattattagtagtgctcgatgacccagtattataacttgaagttgaacttgtattagtagaagcaaactttactacgaaattagcagtacgaacatatttgttcttgccaatcttgtaatatttcttgcccttaatcgttttcctaccaaggatttttacaagtttgcctttctttaatactttcttaccaacacgtttaccctttgcattataaatataagcattctttgtcaacttctttttataggttgctgcttgtacaacggttggggtattttcaacattattattcactaatgccacagagctaacagataaaacagctgctgcacttaagctaaccaataatcttttcttcatttctagtatcctccaatatataatacgtggaaaatttattttcttttttctacctacattatataccgtttttatgacaaaagcagcagctaattacttagtaattttagtaattaaccctttaatcttattcttaaattcatcattagtcttatacaaataagtaccaattccaccagccattgcaactaaacttgcaataatccagcctgcatgttgcaagataaagtgacctgttcttggcaagaatccatttttacctgtaatagggttatttgatcctggattgtttgttcctggattatttggattattaggattctctgtgctattcgtaggattcttaggattgttgacgttgcttggtgacttcttatctgcttgtggtggaatgacattaactgtattagacttaacgtctttgccatttactgtcatatcagcagtgtttggtacttcaccattaaccttagaatccttctttaacttagcagtgatgttagctgtaaatttcttaccgcccatcttgcctactaaatcagccttaggcttccatgagaacttttcagtattcttatcaagcgtaagttcaccttggctagttacgtcattaccatcagcatcagtaatggttaccttttcaagatcaaggacatcttctaagtcgtccgcaaattcaacagatttaacatcttgtttatcaccgacagtgtattcaaccttgtagtcaaagtctttgccttcttgaaccttatctgattcaccccattgacctgattcagccttaacttgcttatttaccaagtttccatatgggtctggggtcttaccatctggtttagaaggatcgttaggcttatccttcttaggatcttcagggttctttggatcaccattaagcgtagtatgaacaacattagttggaatatcttgaccgttaatttgcatatgacctgtattaggaataccgctattgtcatagcttgatacatctgcattcggtttaatgttagaagcaattgcaacatatagtttcttacgtgagaacttagctggatcattagcagtccaagtaaagctttcatcctcatctgaagtaactaacttaccttcgttagttacattattaccatcactatcaatgatgacgacattctttaagtcaagcacattctccaaatcatcacttaatacaagtgatttcatattttgagaattaccaatatcaaacgtcaacagataatctacagcatcaccacgtgaagcttgattgctatctactgttgaagaattaataatttctttcaaatcttccttagaagttggagatttagtagtaacttcactagcgttttgtgatgaagacttaacaggattcttgtacggcgtttgaagaatttttacagcttcttcatattgcttgtctgttaccttatcgtttgccttgctccatacaccagtatttggatcgactttaacgtattcttgagccttttgatagtcctttggcaatgcaccatcatcataagagtcttgccctgaggaagtttcagacttgttgccaaagaatttcgtccaatctgcaggattcttaacaattcctttatgcgtcttaggttcctctacctttggggtcacaactggagtatttgatggggtgtctttaccattcgccttaaagtgagccgtatttggaatttcgatggtattgtttttaatatacttttgtaaatctgcattgtctttgactttagcagtaacttcaactgtatatttcttgccaggcataaccttaaccaagtcagcatttggttgccagttaaagctttcattcttttcatcaagcttaagtgtaccttgttcagtggtaatatctttaccatcggcattcttaacaactaccttttcaaggtcaaggacatcttctaacttatcggtaaactcaacatcggttaaatgttgcccttcacctgcagtatagtcaatcttataagtatagtccttgccaacctcaacattatctttatcttcatgataggaacctgatagtccctgaacacttttaactaccttattttcggctggaggtggagtttcaaccttaacaggatttgaaggaatatctttattgttgtacttcatatgagcaacattaggaatttcgtaattctttgttgctttattcaagtatccacttaaatctgcatcggtcttcagcttgacagtaatatctgcagtgtagatatgctttggcatttgagttagatattctttagaaggttgccaagtaaaactttctttatctttatcaagttttaaatccccttctttagtaacttcatttcccttgtcatcggtgatcttaacgtcttcaagatcaagaaccttttccaaatcgtcatagaaaacaacattactaatgtctttaccattttcaggaattgaatattgaactcgataatggaattcatcaccagcgtcatgcttggctttttcaccatattgaccgttcttatcctctacttgcttaattgcagtaggttcttcatcattcggtgtatgaacataaacaggtggggtcttgatcttttcatcgttatagatcatttgaccaacattaggaatgttgtattgattcgtattcttatccaaatacttgtctaagttagcattcttttgtaacgtggtttcaattcgcatgcttaacttcttacctacccaatcttgaggcttcttagccgtcatattggttgtatttgtacccttatcaaaatcagccgtaaattgatcagtaacatcagtgttaccatcaaaaactctggttttattatgagtaaacactggctccaatttatcgaaaagaaccaatttctttagatctacattgtatggaacttggtagtaaatatcaaaagcaatatctgatccctttttaaaagtagcatcactcacatatttcacatcagctgttgcatcagccttaacaatattagggtttgcattatggtttgcgactgctacacctacgcccacactacctagagttgctgttacacctaatgcagatagcaattctctagtttgcttttttgatagctttttcaaggctattcctccttaatttaacaaaaaaaacacctgcatttttgtcaatgtcacaaatcaaaacattgattcatatgtaggtgttttctaataatatataattattggcaattacttgtcttttgataattgcttgattttgatagaaaatggtttatttgtaccatcttctaaccatgcataatcaagttgtgcattttcactatcagcgagatcattagctttttctgtatcatagtgtaattcaatattattgtcatacaactctcttaagcaagcataaccaagaattgccaagaaataattcttatccttagtcttatcttcaaagacatctggatacaaacgactcattctttccattgcatcaatatattcactttccaacattacggtttgaaaagcataaggtctatctaccgctgtataaggagtatatgctacatatggaaaacgtccatcatacttgctagccaaaccttccgaatacttaaggaataaccagccagcccacagaattcgaactgaagccactcgattgtcttttctatctactagccatgcaggaaacctttctttaataattttatttgtatcagcaagcatagcttctggtaattcaaaatctacaaaaacttgttttgccataacattttcctttctaaaaatcaaaggagcctctaacatacttagaagctcccttataactttctgagccagtgtatttaccacgaataaaaagtctaccttgacctgtccagtcacaggtaaacaacgaaattactggcttcttcttaaactctttattattccaagctaatcttaaattataaactgaaataaagcgtgaagatgtaatcttgtaataataaactttcttataatctgttaataagattgttgttccattaggtagatttcctcttaccttcgcagtatataatgggctaaagaacgaacgcccatcatccatattatgacctgctaaagcgtaattgccttcacccatcctctgatattggttcattgttcctgcacctaagttcagttctacattaccaactccacgatagatatttaatagaacattatgatctcttattgctatttgtcctacagctcgataatctcttctatgctgatatgcattggcaagagattgaggtgatacaggttggacagccttcatattaaaacttggctttttcttctgtttgttttttctttgactcgacaaatgattagttgccacatagttagcagcttgtccttgaatatggtcaaaattagcaatgcagtaaatcgcaaccccaattaaaattaacgcaataatagctattactgtaccaatttttttctttttatcactttttcgctgttgattaatagctaatctacttttttttattttcattttaggaacaaaaaaaggcaattagcataactaattaacctttatttctaatttctacttagcagcttcccaagccttaatccattctggcgaataacttcccacaacggtaaagtttaattccaaaccgtgatcgatataatctccctcattattgaatctaacttttaaagcagcataagcatatttatctttatgtccttcaagtgttctcaagtctatgttgttgtcttcttttgtataagcattaaagatttcatctgcgactttcttgggatctctttcttttagattaatgaagtgctgtttcacattattatatctgaaggcatctaaatcattaagacttctcgcactatccattcctaacgcctttaatttaggtaaaaatttagctaaggtatcagtattttgaaatgtaccaataccatcacctaaatcgttatattcaggagtacctttttgcataattcgatttacaaagttattcaactctggatttgtcttgtaggcaggataacctttactttggcgataagcattgattttttgccataaataattttgaatttgggatacttggtcatcagtaaagtagatataacctttttctttgatccattcttgttttttagattgagaatttgagctattatgcttattgtcgtttgcagtactattcttagaattattagtctttttttctgctgttgcagaattgccagtagtattacctactgcagtattcgtagcattattgtttactgggttattagcaccttcagccgaagttgattgtgcattcgtagctttcacatattgaccattgcctaaggacaagtaatccttgccattaattgtcttaacaccaactacagtaaagacatggttcttctttaaagtatcagtgcccttgattcttttgccttcagcgttataaacataagcattgtgggttaaataatattgaccgctagccgtattagctttactggtcttcttagcaaaattagcaaccttaacgtattgattcttaccaatgcggtagtatttcttaccataaatcttctttgtaccgagaatcttaactgttttacccttcttcaatactttcttgccataacgattgccattactcttataaatataggcattatgagtaagcttgccattttttactgctgcttgtacaacatttgtattattagcaacaccatttatttcattaacacctactgctccaactgataacaatgttgcaacagataaacttactaatacattctttttcataaacataatttgctcctctttccttcaaataattcagcttaaattactcgctaacttttccccgctctcacctgctttcattatactacatacgcaacattatagcagcgggatatccgttaatttttattattttaaaatatactcttgcgtacatcttccaaaacgatcatatgtaaaagataacttcacttgatcattctttcgggaaagtaatgcacgtaatgctaatgtttctttttgccttaaaggtgtaaaatctttagggtattccctcgctaattgattgcgataacggacatactcatccgccgttaatcttgtaacatctaattttttcattacattaaccaatcgatcaacgtaatcaaaattattcataacttttcatcttaatttccctattattatagtttgtgatctctttttaattaccaacggttttacgctatgaccgataacgatgatggtttcttagttagccatcaaactgtaagtttttgtacagtacgtagcagatagcttcacctatctctaacctctcgcttcacgcattccgcaagctgtcctcttatcaatcctaatcaaagactctttcttgcccttcagttactacaacacttaaagagttaagtttatcgactcacttactattgttgatcacattccgacttcttatttactcttgagtttttcatcaaggtattcacatgtcaaaacagccaaaaagaatgtatgcttatcttttagtagcctattacagccattactattactttaaatttaaaatttcgttcaaactaagacttatcatcaagccaaaaataatagtaatctttattgatggacggctatctccatctcggcaggtgtgattctttcttcttccacccgttgtgccttcaattctctgtcttacaaatcctattgagtcggctcaatagtcatgcacacgtcctacacccgttgcagagcatagttgacgcttattctgttttcaatgtactagtggactgtctaccagtcctaaaagaaatagctgagttgaacagctaaattattgatcaaaaatcaataattgtaccgactttcttaatgattaacattctaaggattttgcctcttttacttgatttgtcacgactactgccacaataattgctcctgtcacagctaacgcagttaaagcaaacttgctaaactttttcacgtttttcacgtttatcatctcctctgattttcgtttacccatttcttcaatgctgctttatcaatttttccttcttgatagcttctcaataatttcaaataattgcttctagcaacttctttttgtgtaattcgttgcagtagcttttcttgttgcttcttggctttcttaagccccctattaacggaaaaacttggtgggaagccctgatttcttgcgattgtttcattaacttctgttaactgttttcgcaaatcattaatttgactatcatacctaataaggagttctttaggattatcatccatatttttcttcaaatttttcatgtttgaatacgctcgccagacgtaataaacaatataaatacctactgcgactgttattaacttatacatatttttcctcactagattagagcggaaagattcgaactttcattgcaagtattaagtattgagtattaaagtattaaaaatagggatatatatgaatagcaactttttgattcaaaagaggagcaactcctttaaccaatattcattccaacttgcattttacctattaaattacgccctagttttacattaaatagctccagtaatatccgataaataaaatcatgatccatagaataattccaagaatcgatagcagaactgtcactaattcatccaatttttcaaaaaagttagcaaaccttgtgcctgctaaacttggcaaagatgatattgccataagaataattatgaataaattccccgctccaaatgcgatcactatgtatcgaaaatgttctaatataaatgaactgatcataatatcttacttgctaacatcaattagcggctttttcctatgatgagattcaggatattttcttttacacaataacctgcgatgtcctaatttaggatttacttcaaatccaaagcctaaataaatttgatcataaatctcacttactcgataaaaagttacttttttatatccagtattgtatttataagactttagagacaaaaaattttttggattttttataaataacccgtcaatattccagtaatggtacccatctatcgtcagaatttcataaacttctttttccactctgaatacgctaaagcgtctattttttactgatttttttgtcatccaatactcaccaatcacattatctccatcaaaatggtaaatcagcatctgttagttgtacttctttctgacttccaaaaggttcttctgccaatttatcttttttgtttgcttccacaatggtacggtcagcttctggctcttcatcatttgcttgatttgaattctgaggaatagcttttgtagactcttcattttgacttgttaaaacatcaaatgaattaacccagatatattcatatgcaaccttattaccatttttatcaataaagcttctagtcctttgttcaccagctagaataacttttaagcctttatgtactttagcaacgagattttcagccactttattccacgcaattacatggtgccattcaccaatatagtcttgttgaatcttgctataacggttttgacaaatagtaaaggctacatacttttttaaagattgggttgtctttaactccaattcttttccaatgtagccgtcaattacaacttgattaatcattttttgttcccctcttttaaaatgttttgctatttatattgtatatcgtttttacgatatttcaagcaaaaaacaaaaaatatacagatttgtagaagaagtaaagcaaaaaagacgctaacaaacttggacagtttgtagtgactttttagtaaattcatacttttcttcactagcttcatggataacatttaagagagcttcgcttttattttctcaaaatatttattttctatctggctaacataatttctcatatattcaaaatctaatattccattactcttaacaggtaatttgaattccgcattataaaaaatgctatcaacatttcttacagcttgtggatcaaatttcaatgccagtctttgcagccatggtagtagatagagtcccactttttcatctatttcaaatttcggttgaatgacttttataaattgcccactataccatgaatcattttgataatttacattcatttgcattaatcccaagctaaaagttttttctggattaagatgttctttatcaatgaatcctgtataacaatcaataccgttgttatttcgagttctcgttacatatggataattacaaggcatatctttatttaatgatattttatctaaatgtggagcggaataaatggaaaatagttttgcagaagaaaagcttttaaaattttgcatattacacctcttaatccaaaattttacctaatttaaacttcatataatttcttattgctttatcccagtcttcttcttcaggagttgtatttactttatagtggttttcaaaattccaatctgtacctgtattatctattacatcctcgacatattgtttctttaaatcccataactcattatgaaattttgaattattaacggctgcttgacctgattttaaaagcaataaaagatcgtgatacctattcgcaggactgctgattgtcttaatcccacgtttggtccttttataaccatcatttctaaagtctataaactttacgcccctatcaaaatcatgtgggaccccaacttcaaatatgtaaattgacgtacttacaatagcattaggcacaaacaaatcagaaggcatctttatagaagctaacagtgtgttgttctttaaaatttcctgattagtagttctagacttgccgcttcccgcactatcttgaattataatcgctgctttagcacgctctttattagacataaactttaatccgtatgctaaaaatggcataccataattgtccgcactaaatggaggattcaataatagcttatttgcattgaattctgtatataatttagttggttctttaaaagtatcacctttctttatttgactagacccatcaccacgcaaaatcatgtttgacgcagctagcgtatacatttttgcatcatactcaacgcctaacagttgagactttttgatttgctgaattttcctattcgctttttcagaattagacccatatgtgttattggcatcatcgatcattaatttcatgctagaaactagaaaagctcctgatcctgtcgctaaatccatcaccctatcattcatacctacatctattgcctttgccatcagattagttatgtatggtggtgttaatactttacctaagctacctccatcacctaaagcgtactttaaaaattctgaatacattgatcccataatatctagagaaccactgtccgcatcaatctgtaagaaaatttctttatacagaaaggtaaatacttgcttagttatgcttgccttttcagtctgaatcatctttccaacaattttatctttatcaattagcttatctctatctaaatcggaatgaatcgctccttcgaaagaatccatcattaacttttgtttatcttgagtaatatttcctcgtttatttaagaaatcacttaactgatcgattattttaatagaatcgctttgtttttcgctttggattccttgtaaatcacacggtgttagtcctcccgcaatgtattgacctgttttagcatctgtaaccttttgcattgccaaaagcatacctgaaacatatacaacacgctgttcagttgatatattcaaattattcattagtttattcaataattttgcttttttttgcaatttttgctgtgatttgactaatacctgatgcttttcagtttcagttaatagagcattatttaggaaatcttgaaatgcttccttggtggacaaaaaatgtaaattatcgtattcatacatacgttttggtttgccattgacagcataaacataataaacctgttgcactacatgatcaggattatcaccagcaacacccactatgatacatgacttatacatctttgatttaagaattgttctcgcataatgtaacgcaccattgacagcatacttttttatagctgattgagtcgtagaaatcctacctttagcatctaacttgattagatacttagaataaagcttattttcaaagagaacaggaacatcgtattttgttatattaaaatctggctcaccaaagttagttttatttagtgttttagctccaccttttagtgcttctttcagatactcgtccatatatgattcaataccatagtcttttttggttaagccaatctcttcttccaactcatgctcaatatagtcatccacttgtctttctagcttgtaacctaatgtatctgacatttatgccgcctccctttcgaggttaatggcagcacaaaagagcgtatttaaaatatatacgctctttactaatcctattaatagttcagataatcctaagatataaattttacagttgagatagctgggggctgtacccccccattctggaagttattctggatattgttattttttgttagcatttatcttctagtcctcttattttttaagctgtagttagtggcttaaatgttattactgcatgcaatcctaatcctttagcatatctattaagagtttctaagctaggaattgaagttaagttttcaatcttagcaagttgtggttgtttcataccgattcgtttagctaattcaacttgagaaattccttgcttgatacgctgagcatgcaggtaagctaaactatcaatagctgtcatttcttcaggactgatcgatgttaattccttttttaattcgttccaagtagtcattcttattcgttcctttctaaccaatcatctaatctgtcgagggcttttgctatttctcgtggatctgttttattgttttttttagtgtaatgactcaatataacatatctgtctttcttccaaccagcatagaaaaagcgctctggtaatggtcgaagctctagtaaaggatgacgataccctttcagaaatctagactgaggcattcccatatggttacctaactgttctaacatgctaacttgataagaaaattttgttaaaacctgtttatcttgtttttgattgcttcggtctaattgacgaatatactccttcacatctgatcttccatactcgtcctcataaaaatctacctgatacatttcaccctcatataactaatttgatatatattgattatatagcaatcaggctatgctatcaagaaaaagtatttgaaaaaattaacgtagtgaaaacagttattacttttccctcgaatcttgtgtaagccttctaaacatcttaggattaggtaaactgataaatatcttgctgtacctattaaagacgtacggacacctaacttcatagccttcatatctattagcattgctgatttttgtaacaaaattagtagtagagaatacttgtcttttacccattattaaattagatattgcacttctcccctctagtttgtcatataagtaaattgaatcgctatgtttatactgaataatcccaatgtaatttgtagtcatgtagtctaagttagctttttgcgctaatttatgtgctttaacaacactaattattctttcattcgtttcattttccgcttaatccaagcaccccccatagataaccccttaattcctagaaaaatcacaccaattatcagtgcaattctccataagccatccatcagtgttaaaagagctggaaaaaccaggtaaattccgaaagctagccaaaccaatttccagagatggaatgctgaagcaagaataaagacccaaaccataatccaaaaccaatctgtttgtgaaagtactaaaaacatagcgttctccttagcattaataaactcttattacctttgtctgaacttgaggaatattacctctagtattgataactacttgcaaatcggcttcaatttgccttgcttgcttagccttaaaaacttttatttgatttttaggtacgattgccttaatcactatagggggatcgtcctcaaaagaatgatgatcatttgataataattctagcatcgaacatccttgattcatatcaacattcattactttaagcgagacagacttataattcacagtttgtttgtctcttttggtaactctattaacatacttttcttctgcgtctgtcttgttaaagactactgctatccaaatcaaactcgtaagaaagtaagccaaatatatgcttaaaaataatttcatagctagctcttttcaactactacgagccattttccttcaccaacatacttaatcttttgattagccttaatgctgataaaatgaccattaagctgcttaacgcgaacataaaagctattactatccaacggttgaattccaagcacctcacttctaaagcgccaagtaaaaactttagctaattctgcaggtgtagctagcattccaggatataaatcatatttattcatcatgaacccccgacatattcatataatctacaaaagctttctcaatcaatttacccatttttgctagatagtctgggttataaattctattgtttaatacttctggactgtttcccattaagcccaatgcttcccctgctaaatagctgtttaactctagcttccgcttactactaagtcgttgcccatctagttcaagatcatctgccatgctaagaaacgcaatggaaaacagtctatcttcaatttcttgaatatcaacttttccatcaagcaagtcttgtgcaacttttttatttttaggattcattcttacaacctcatatccgtctaattatctatttatcaatatcttacgatcttatacaaaagtatcgcaaaaatgatatattaataatgatttactacatagaatttaaatttttaaaggggcatattatgaaagataaacttaagcaatccatcatcgcaattactagtgccaatctcaaaaaaattttatataatcaaaaactaactcaacgagacttggcaatgctaactggaatctctattccttcgattaatcgttattacttaggaaatggtgccataccacaaaacaacttggttaagatcgctaaagccttgcatgttgcacccgatgaacttgatccttcatatcagcccactaaagatttcttgtctcaattagctgaaaaatctgataacccagatttaaaattcagaactgactatcttaaacagttaattcaaactagtaacttatctgttcaagaagttgctagcagacttaatataaagcccattacagtctataaatggctagcaggggtaaatacccctagcaaggaaaatacggctaaattagctgatttatttaacgtcagcgctagttctctagtaaacacttctcaagaagttgagttaacaccgcaacagaccaaaatattgggtactttaccacctgatttaactgatcaacaaacagatttaattgtttctttgattaaatctgtactaaaaaatgctaactagttttcgatagattcatacatgcttgaaattccactaattagtgctagctggcagttaattctccattgccaccagttaagtatgtattcgacttgatcatttgaatctagcatggttactgagctagttgatacttgcaaatctgaatcttctaggattgttttaatttgaattgcaagattatctgacgttgttttagtttcttgcttaactttaaggtgattatcgcttaaaatgtcgcttaataaacgtgaggactctttcaaattcagcatccaattagaaggcaacaagtcgtcaatagcgtaacctaactcatctactttgaatataaacttttcaaaattttcttttttacctgttaattccatttatttctcccaactgattaaatctatagctctttgtggagcgttatttgtttacatgtttttgcattttatcttagctggtaatttttgcattccagtcaatctcgtgttgatgtttttgcatccactcacaagcttctttagcaaaaataattgtagttttaccagctggcgtttttctggggtttactacgaatccatcatttttataatcaacttctggaaattcatcgaaaataaaagttcttacccagttatcacctttgccacgacaacagtattttctaaactcatcgatattccaagtcttgccagttaagtcttgcttatctgcactaacagattcttttacaatacttttaattagattcgtaaggcttggaaggttgattaatgtgtcagacatatcttcttgcattgctatccccagctttcataatttctatcatttgctaagccatctctcagcatctttaacaaatagctatatggtttgcctaccatgtcccatgacattctttccttgaatttatccttaactgcttgcaaagtatctacgttgcattgatataacagcccccgtaactgtttaagctcatcaagtgttggattggtagaatgattttttagcttatcgttcatccttgcaatggtaaaaaactctttatagattttttctctttctggatcttcttctttcttcgcagaagaagaattactaactgtattactattaaatgtattactagatatattactagttgataatttattaaatacccctttagtattcttaatacccctatttagttttttaacgggggtatttaatttactaactacccttatagttcgttgcgtaacgttattctttgttgaatacatagtggtgatgtagcctttttcttttaagcttttgactaattgtgatacacgtcctggtgtaattcccaagaaatcagcaaaaagcttattactagcaaaacatccattttctccatcaagactgtcaatttcagtaatcaaggcaacctccatgatagttagatctttatctagccaatactcagcaggtatccaaacacctttaaatttatgatttgcttcactagtctttcttttcttagtcattgttattgcctttttctttctttaagtactcccataatgcggtcacgatcaaactatttttcgttatgccacgataagaagctaacttggttaattcttcgtccaaataaataggcactcttacgcctgtcgttttctttggtgttgtcatagtgttatcacctcttgtaattatattaaagtgttatcactttgttgtcaatggacattttatatgtttctttgatgttaaaatgtaatcaaattgataacactattggaggtgcataaattggcttctaaattacctatgtttggtttgagagtagacccagcattgatgaaaaagcttaaatatatagcttcatacaacggacgttctgctaataaagaaattgagcaattaatcatcaaacacgttcagcaatttgaaaagaaaaatggaaaaattaatgcttaatttgtttccatagcacattaacaattaaattattaatgctaatttgtttacgctctgctaatcgtctaagaccttcatacaggtcattagacatgcggagcgttatttgttttcgagtcattgctatccccagctttcataatttctatcatttgctaagccatctctcagcatctttaacaaatagctatatggtttacctaccatgtcccatgtcattctctccttgaatttatccttaactgcttgcaaagtatctacgttgcattgatatagcaaacctcgtaactgtttaagctcatcaagtgttggattagtagagtgattttttagcttatcgttcattcttgcaataaagaaaaattctttgtagattttttctctttctggatcttcttctttcttcctagaagaagaattattaactgttctattagatgatctattaactctgttatatttatgtgacatgggtgacactgggggtgtgacattggtgtcactacccttgtgacgctcagttccccaccctagtgacatgcatgtcataagggctgaaccagcatgaatttttcttcctaaaattgcaccatttttatcactaacaactttttcacgctcaattaattttttcttttcaagcaaatccaaatatctattaacctgacgacctgatacttttaaatgttctgcgattttttggttactcataaaaaactcgccagtgacattaagcattgagataatttcacccattaaaagtatcgatttaggttttcttaataaatcttcatctcgtgaaattgatggtggaatcatcagaaatgctttagatcctttaaattcattttccatctgttatcctccctttactattcttattggttaagcacttgattgctcagcatattactattttgagtagttaaaagcgctaaaaaaaatatcatctttgctaactccaaaataatcagcaattttttgcatcataggtggtcttggagtagatctacctgtttcccatgctgacaccgtaacttgcgttgtacctaaagcttgtgcgagatctgattgactcatgcctttttcaactcttaaaattttaagcttagttaacatttaatacctccccttaactacatttatatattatactattttaattggtatttcaagatagaaatcaaattaaaactatttttagtagtaattcactatttttattagtattagtagtaatataaatgtaaattaatagttaaggagcctagaaaatgaaagattatgatagaaagaaattagcaaataatatcaaaacacttagaaagcaaaagaatttaaatcaagcagaattaggtgaaattttacatgtttctcaacaaactattggatcttgggaaacaggtcgagcaattcctggatcagatacattaaaaatattagctgactattttcaagtaagtactgatgagttactcggaagaaaaacatctggttcagcaaatgacaccgatctaagtgaaatgattaataatgctagattcttcgatggcaaaccaatggacgaccacgataaagaattagtcagagatattctaaagagaatttacaatgaaaaataggaaaaggtgtgcattatggacactgaacttaaaaaaatacttaaggaatcacacataagattagaatttgctcctctacactgcccaggtttgcttgttcatggtaaagataataagcctgatgtgatgatagttaactcaagctatgatgatgagcaagctaaaaatgtaattctacatgaactgggacatatgatgtacgacaaggatgtgcaaggtgattatcaaagcgacgactgcgcacacacttgtagtgaacatagtgctaattcctttttaatacatgaaagagtcaaacaatactttgcgttaggtaatgatcttcaaaccgctaattggctaaactttgcccaaagtatcgggacaaaggattactttcaagtacaagaagaactaagtaaatataaatttgaagaatgagtctatgaccaaactgaatattactaactatcaaaaatacccgcctacttcactatagtagacgggtcaatttatataagtagcatataagtaacttatacgtaatgcataaataacatatgaataatttaaatttaagaggtaaataagatggcgcattttgaaaaaagaggcactaaatggcgggcacaagtatcttggtatgatgagcaaggtaagcgttgttttaaagtaaaacaggggtttttaaccaaatctgcagccagaaaatgggctaatgaaatggaagttgcaaaagacgccaatcaaatatctaatcaagaccccatttttgctgattattttaaggactggtacgagacctataaaattcctggcaaatcaaacaacactcaaaatagatataagcacatttatgtattactacaacagaattttggtaaaaccagaatttcaaaaattactcgccgctcttaccaacattttatgaattcgtatggaaaaaagcatgttaaagatacggtctataagactaacggaacaatacgaacttgtgtaaaagacgcaatgagtgaaggattagttaaaattaattttactgagcgcattaatcttacatggaatgaggaacgttcaagaaaaattgaatatttaaactttaaagaggttcaaaaactaaaaaaatcacttttaaaagatattactccctcttatatcagtcgttatatgctactaacaataatttatactggaatgcgtccaggtgaaattaaggtgttaacatggcatgatatcgacttcaagaatcacactattagtatctctaaatcgtgggactatgataataataaaataatcaattatgattctgacgacataaataaagaaacgaaaaataagtcatctactagaatcatcaaggtagatcaaaatttattgaatattttagatcaactaaaggttaatcatcatgaacgactattcatcggaaaggatggaactattccttcatcaaatgctgtaaacaaagttcttagaaaacaactggcaaaaaataagattaaaaaagatggttttcattttcacagtttgaggcatactcatgtagcaatgttactatttaagggagttgacttatactcgataagtaaacgactaggacattcaaacatgagtattacagctaatacttacgcttatatgctagacgaattaaaacaacaatctgatcaacaaatagtaaacattttagatcaaatttaattaaatggataccttttagatacctctacaaaacaaaaaccgctctagaacaacatctagaacggttatctatggagatgaggggaattgaacccctgtccaaacgcatctcgtcactgacctctacgatcatagttatattacttgaacttcactagctcaaaacgccatataacagggctagaatgggctagctaacctgttaagactctttttaactattcaggtgaggtagttaaacgtaactcgctaaagttgatactcggtgtcagccacgagtaaaccgacaaggagcaacacatgcgcttaaattaagcagctaatgcgtaagaatttttgttatttgcagttatatttaactgtaacgtttttacgtagtcgtaacctacgaaccgcagtcaatgcgggtctacgcctgtcgaatcccaaaacatccccttgagatacttattcattatagcatagacacacattacatgcgataaaaatgcttaatcaatattagtcaaacgtaccacatcacgttcaatcatcaattcttcattagttgggataaccattcctgcaactttggaatctgtttttgtgattagtccttcactaacactttcattagcttcattatctacaacaacacccatatatgcgaaagcgtcaagaaccgcttttctcacaccagtatcatgttcaccaataccagcagtaaagataattgcatcaacgccgcccatttcggcaatataagcaccaacgtagcgaataatacgattaatgaaaatttttcttgctaacttagcccgttcgctatcactttcacgcacatcgcgcatatctggtgaaattcctgacaagcccaacaaaccagacttattattcatgatataaatcatttcatccatcgacttatgctctaccttcattagatgttgcacgagtgaaggatcgatatcaccggttctagtagccattgtaattccggcaattggactaaagcccattgaggtatcgtaagacttgccatccttaactgcagtaattgatgcgcctgatcccaagtgacagatgactaactttaagtcttttaaatctttacctagtaatttagcagcacgcggtgctgtatagcgaattgaagtaccatgagcaccatatttacgtacaccatatttttcataatattcataaggaagtgaatacaaataatgtactggatcaagattacggtgataagtagtatcaaaaaccgcaacttctggcacatttggtaaaacattcataaaagcttcaattccgcgagcctcagcaggattgtgaagcggagcataatctgacaattcgtagatcttaggcagattttccttagtaataatagtagaatccttaaagtactccccaccattaacaacacgatgtcctacaccgacaatttcagttagttcttcaacaacatggtatccttttaaaaacttgatcaataagctaactgcagcttcttgatctgggatttcagttttttcaacgtgcttagtaccatcagctaacttaatctcaaatgatgaatcttcaagacctacacgatcagccattcctttggcaagaaccttttcatctggtaatgagaataatttgtacttaaaagatgaactaccagagttaattgccaaaacttttttcataaaaattaattcctcttctttcaaaaaaataagtgctttatcaattaatgattaatctttgcataccactcgttaagtttaacattaaattgaattaaagcctcttcttttttcaaggaaccaagtttggtaagcaaaacttcacttgctttggcctcatcaccgtgattttggaaaactaaaactgacttttgattaaacttgttcttaaacatatcatctggcaactctacaatcgccttcaaatagactttcttagttaaccatggcataaaatcagtgccaatcttgcctgacaaaatagacttaggaactaccaaaaaggcatagccgttaggctttaaattattaataatttgttcgattaacaacaaatgagcaaaagaatgacctttcttagcctgattttcaaaattcttggcattctcatcaactggataatagcctacaggtaaatcacttacaattgcatcagcgttaggacacatccaaggcattaaagcgtcttgatgatataactcaatgtcaatattattcagatgcgcagccacatctgtcaaacttaacatatcttcatcgttatcaatccctaccaattgataattatccttagaatgattgagtgccttaagttgagaaataattgaaaacaacaaattccctgtacccacggcaggatcaacgatttccatcttttgatcttttaataatttatgcatcaacattgctactactgtagcaattgcaggtggagtaggcatttggttaacatcaaagccatcatcattaactgcctttaaagttagaaaagtaaagacttgagccttttctttttggctaatttcgtcataatctattgcttgatacttttgacttaattcagccactgttttttcatccggtgcaccattttcaaccttaatcttgccactttctaagttatcaaaagtctctactaaggcttctgtaaatgaaacatttaatgccgtttgcaaagtttgcacacagtctaaaaactgattaaaaagtttttcaaaattttccatagcggtccctccataccttaattattttatagaaagggataaagaggtgcaaggaaagtcaatcatccgttaagcattcgataattaggcgattgttctccatgctagcatgataaatatcttgatacattttgataaacaaaagcgtggtcattaaaactaatacactacttagtaaggcactgccttttacgttatgcgtctttttctttggttttagcatttttcttttcctgttcctcatcaagctgaaaaactaaatctgatacacccttatttttctctgttaccctaataatgatgctatctttagtggttttaaaagcagccttttcaacgttaaataataacggcatatagcctttccctgcaccagatactttaagtacgttctttttatagtattcaattcggtaagtagttgcatcgcctttttgatctatgcacttaaaggaagcactattacttatagctaatttagttactggatacactgccttaattttgtcagcccgcataaaattttctagctgtacataagcataggctacttcattgacatgctgattttgattcaagtttgcttttttaacactcaacaataaattttgtaaaattagcagcaccatcatagtaataagaagcgaaaacattgcttcagctaacataaaacctttactctttgaccgcaaaagtttgtttagtcgttgcatcccaaacatgattatgtcctgccttttgataaattcgatcgtgaactgttacttgctccaggtcagttttagtcagtatatggtaagcataagcacgatctgtttttaattccatctcacgaccatttttctgattttcagctacagttatataaaagcaactaacagcaatcacagcaattataattgctataaagctctcaattactagaaatcctttaacttttatcattccgctactctcccccacagcatttgatatttcaggcttttttccattccgtagccactaaaagtcaccgtacctggtttagaataaccagttaggttgaatttaaaatgatccaagccagtaattttgatattttgatcaactggaatacttttgtgatattttccgccagagaataaaatttgattggatctagctagatatgatacgccaatagtaacctccttgatcgtactgtacctcgaagtttgatcaagtgccgtcgtaactcttttaacagtattatcaaaaatcagtttttcttgatatctttttaactgcaaactaccaatcaacaaaatgccacagcaaacaccaagtgtaattattacttctagtagggaaaagccggctaatttatttcttttcaacaacttcgccactgtctaacgtgaaattctttttagctttagtaatttgatcaccagttaagtaatcgtccttttttagatcttcaaaatctttaggttcaccatatttatccttatataactcaacttgcgtttgcacagtagtcctaaatgcatccgcagttttagtttcagcattcttcttttgattaatcaaattaggcacaattagcaaaatcaaaatcacgataatggcaattaccacaaccatttcaatcaaagtaaaaccctcttgcttgcggcgcttagccataatgtttgctaaatacttcttcatcttctctttcatttttaacttaatcctcttcttcactctattttttacttttatctttaacgtcactttttctatagtccttgcatcattgaatacattggtaataacagcttcaaatacattccaataatgcataagccaattaaaataaaacaagctggttgaacattgacgactaatttctcaattttttcagttaaatccaaaaataggctacgtcctaataacaaacagcgcttactcaagctctttcgctcagagccagtctgcaataaaactaataaactattaggcaaaaaatcctctgcattaataatttcttctaaattttttccttcagctaaatcgtgccctatcttttgtcccagtgcttgctgcaatgaacctttctcttgatctgccgcatattcgcacattcgctgcaatgaaaagccactagctagcagcagtccaatgtcataaaccaacaaataatgaatatacagcataactacttgcccaattaacggatatttactcagttttttcattgatgaataatcctgtttattgagcaaagtaacgatcttagcaaaaaaatataagcccagcaatacaataatgatcagaccaatcatgaccatatctcctgaatgatcactgctatcgctgaattgtgtcgaaataaacgattgcataaagaccagtaaaatcaccatcattatcgctaaaaccaacggataagataattcagcccgcagttttttcatctgctcctgttttagtcgattcaacgttgctaaatgctgcaaacattcaactaggtttccttgctgtaaagccaaattaacctgagttactgtcgttttagaaaagcctagtttaagcagttcagtactaaaacttgctccttctttcatgctactagccattctttccatcaactgacgcctttttggccacaatgccggcattaattcaattgaattgagcaaagaaaaaccattatctaaactatgttttaaataatccaaaaaggccaattgttcttcgccatttaacttatcctttttggaattgccaatatacttcatgattaatttctcctcctttccacaaacgctctagattttcctgccaattaacgaattcaccacgaaccgatttgcctagctctttttttaacaaagaatctgccgcaatatccatcaagcactttaattttccttgactgactaataatcgctgatacgacactgcagttagacaatttgtcagttcgtcacacctaatacctaatccctctagtcgagaaatagtttgcaaagtacttttagcatgaactgtcgcaaaaaccaggtgtccacttaaagctgcatcaactgctaaacgtgctgttccttgatcacgaatttctccaataattaaaatatctggacgatgccgtaatgccgcctttaacaggttttggtaatcaattcccgcttcgttattgacttgtgcttgcaaaaaagaagactcatgaatttcaacaggatcctcgattgtcatcactactttgttttggctcattttcttagcaatttcatacattgtcgttgtcttgcccgagccagttggaccactagtaataatcaatccgcgactcttagccagcttttcaattgttcccagctgctctggaataaaatattgactatggtcaatcccatagatgactcgaataaccagtgactcttgatcggaaaaatctcctaagctagataaacgcaagaaatattcatgtccttcattctcatatgtcattgcgccaacctgcgggcgacgatgttctgcaatatccatctgagcactgtacttaaaaaaattgataatttcctttcccgtctccaaagtaaaacctgcatattcaattagacccttaccggtccgaaatttaaccatcaagttttcttttttcgggaaaaagaaaatatcacttgctttaactttaattgcctcaattaataattcactgacaatttctttgatcttcataaaaatcctccttttttgcctcacattatttattacgcaaaaaaagtcgatttttttgtgagaaattgaaaaaaacacaaaaaattttctcaactctaaaaaacgttgatctaacagcatttcaagattaaaaaatcattaaaaagtacacaaaaaaatagcttagccattggctaagctatttcatcattaactaattaatcttcatcagccgctgcagtataaacattttgaacatcgtcactatcttcaagagcatcaactaaatgttcaaattgttccttcttatctgctggaactggagtggtgttttgtggaatcatagttaattcagcatctgctagtttgtaaccatccttaattaaggcgtcacgtacacctgcaaattgctttggatcagtgtagatttcgtatgcatcatcactagtttgaagatcgtcaccaccagcatccataacatcaagtaatacttgatcttcatcagcatcagtagttgaacgatcaattacaatgtagcctttacggtcaaacatgtaagcaactgaaccagtagcaccaagtgaaccaccgttacgagtgaaagcaacacgaacgtctgaagctgtacggttcttgttatcagtcaaagcttcaacaaagactgcaacaccacctggagcgtaaccttcgtaagtaatttcgtcgtagtgttcttctgaaccaccttcggccttcttgatggcacgcttgatgttatccttaggcatgttgtttgaacgtgccttatcaattaccatacgtaatgtaggattcccatcaggatcaggaccaccactctttgcagccatataaatttcacgagataacttttggaaaattttacctctctttgcgtcttgcgcattcttgcggccttgaatattgtgccattttgaatgtcctgacataaggatccttctttcttttttctaatattaattaacgttattatcttaactcacagtactttaaaattcaatggtgtcaaccatttaaacttgttttttctggtcaaaaaatctgtgtttaataaacaatactaacattatcagcaaaattgccgttaaagcccctgctccatcaagcattacatcgtgcacgctcggtgttctatcacctgttaaaaattgatgatattcatcaaacgcagcaaatgcaattgccataaaccaagttaaaactggtgctacccatttgattttgaaaattcttcttaatcctaaatagccaaaaccacctagtaaaaaataagaaccaaagtgagccattttacgtaaaacaaattgggccagccctgctcgaccatcaacttgcacattgtgaatacgaccaccgtaagtaaaatcccagccagtaacgatattctctaaccagccaaaataacggttaattttattgtcatgaatttcctgctgttgataagtcattgaactagaaatgaacaatgcaactagcaccaataaagcaagcagtaaaaagattttttctcgtttagtaaaatgaaatttatccattgctatttcttctctcttttttacttcttactttaacaaaaaacgggttaaacttgacccgttttataaattatttaactttgcttaatgcttcatcaattggtgtgtccccatcatgcataataattacttgatgaatcgtattatcatactttaggctatcaaccaatacctgagcaacatcatcaatcgaattttctccaccttctggagtaaatgatgtcttacccgttgctggcttctccattaagttacctggttgaatgatcgtataatccaaattagtattatgaattaaccattcatcagaaaagtacttagcaatatcataatcaataatgcttgcaagagaaggaatttctgcccacttgtcttggtcaagcgcaaaggcggagcttagttgaacgtaacgcttaacgccattagcttcagcagccttcatcagcttaactgcgccatttaagtcagtttgcaataagtcctttccacgagaacctgctacaaaaatcactgcatctgggtgacctaattcttcggtcagcttattaagcgaatcatgaaaatccaaatgttgcacccgcatattaggagaaataatttcaacagtattttctcttcttgcacctgcaattacttcatagccttcatctatcaatcttttgattacttctttgctcactctgcctgtagcaccagctacaaaaactttcattgtttttcctttctaccagctagccttcttaacacctggaagttgacccttatgagctaattcacgcatacattctcggcataagccaaacttccgataaactgaatgcggtcggccgcaacgttcacagcgcgtgtattgtctagttgaaaattttgtttcttttttgttacgaataatttgtgatgtttttgccataaatacctcttatctgcgtctatttattctttgaggcgctggctttcttttgctagttaatagtcccaacgccaaaataataattccaattgccaatacttgtccagtcattaacatccccacctttctttttgactcttactttttgttggtgtattatacatgcttacctataataagtaaagagatttgattgtaaatagaaagcgttttacactagtctgatacattccctgtcaagtagacagtagaattacataaagcttttattcctcagttgattaataatcagctgaggattttttggcttctcttattttcttttcgtgtattttttgccagtatttctcaattcgatgatttggtgcaatagggcaattcttaatattgcctttcatcgcttctttgcgcatttcaccagcagttaaaccgttaaaacgtttctgtggatcttcattaatgtagtaatctattgtcttacaaatagaatcattaagttcatcataactggccacttgaggatgaagaataactcgcatttctttgataatgccttgccagccttccattggaccattatcaatacagcagccaacacgagacattgattgcgtcatgccttggtcttctaattggttttggaaaggtgcgcgagtaaattgaaaaccacgatcactatggaaaagcggatgagcattagggtatgctttaacagcctgcttataggctgcttgaactaaagcagtatcgtttcgtttactaattgcgtagccaacaggatagcgatcatatagatcaaacacagtacatagatatgccttaggcaggttagcagcaacgacttcagtgatatctgtacaccatttttcattaggtctagatgcattaaagtctctttttaacttgttttcggccgttttctcaggcgttgtatgcttgaactttagcttctggtatctaggcttttgtgatctaatgccattgatacacatcaagcggtaaacagttttatgataaaccggcttttcatcagacatctgtcgattaactgccatggtcatcttttccgtcccaaacagactgttgttagacttagttatttcaatgatctttgcttcaatctttttgtctcgttcttcacgcttactcggcttgcgcttaggatcaaagtatttgtaataagctgagcgtgctattttagcccatttgcacattaaatcaatcttccaattgtacttttgatggcagtcatggattaactgatatgtttcttgtttccagcgtctttttattgcggcttgtctgtatcttggttgtccggcaagcacatcctttctaactgatctaatttttttaggaattcgttcttagtttgttcttctttgagctgacgctctaattccttaatttttcgattagccagttctaactcagttagctcttctggcttcttatgtctgcctcgtttatctgttaatcctgtttcaccattagctagatatttgtgtgtccagctgtaaacctgctggtaagaacaatcaaatttgacagctgtttgagtgtaattcttgtcgtgattaagacagtattgaacaatctgaattctttcttgctgggtagtttttcttcttgctttagtcatatagacctccggatggggatcatagtcccgattttctatatgactattatacttggaaacccattctgatactgttccattgcttctaatgccatatttattagctaaagaaggtaacgacattttgccagctaaatattcttgaacaaccttttctttaaatgccttagagtaatgattattgtattgagcattacttagaagggtatcacgattgctttgatattgatgaacccatcttcttacttgcatcgctccacttttacttggcatcttaagccgtttagctatttcaacgctgctcctattaccattcaagtattgttcaactgcccatatcttttgatcgaatgaatatttactttttctggacataaaaaatcccacctccatggataattgaatactttatgtatttaaatcgtccactttagtgggattgtatcagtcacagttctttttaataggtaaaatttatttgaatactttcatctaagaaaggaatagaatgaacgaaaaatgtaaaaataagtcgccaggattcttatctttttagggagtaattatttttaaatagagaaggatgagaattaattggacgatttaacatcaacaaataaaatgaaagccatcacttggcctgttttgaccttgatggcactttgtactgttatcggcttggacgatatcatgtacaacttccaaaaccaagggatgccagttatcacctcttggattatcatgtgtttgctttatgtaacaccttactcattaatggtaggacaattaggttctacgtttagtgaagaaggtggcggactttcatcatgggtccgcggtactgacggagaatttttaggttacttcactgcttggacatactggtcagcctcaattccttatgctgtagactccgctaacgaaatcattgtcgacctaggttgggcattgaccggttcaaagggattccaagataaaattcctactaccatgtttgctgctttgactttcgttgtgttcattgttttcattatcgttgaacaccactttgccaactcaatggaattcctttccagtattggtggtggtttgatggtcattatgactgtcttgtttgttttccttgcctttgttggtttggcaaaatcaggcggtcacatggctacccaaccatttacttggcacacaatcattcctaaattcgacttgcactactggtcaaccgtcggaatgttaatctatgccatgaatgggtgtgaactggttgcaccatatgtaactaagatgaagaaacctaagtcagacttccctaaggcaatgattactttagctatcatgactgctttcttaactatccttggttcatttgcacttggtatctactttgacgcataccacattccaaacgacttgaagatgaacggtgcttactacgtattcgacatggttggtaaacaattcggtatgggtaaattcttgctttacctctgggctgggacatcattattgttcaactgtgccttggttgccgtattgcttgatgccatgactagaatgcttatctccgacactggcgataagtacatgcctaagttcttacgtaagaaggacaaaaacggcttaccaattaacggttacatcttaactgttgccctttcatcattcatcatgatcttaggtatcttcttacctgacatgaacgatatcttcaactggttgcttaacttgaactcaatcatttcaccaggtgttacctgctggatcttctactcattcatgagagtaagaaagaactcaaagaagtacccatcaaaatatgtctacattaaaaacgataaacttgcttggcttgttggtcttgccttgttagttgttactgccgtagcaaccatccttggttttgcaccacaagatgttaagcaaggcagtggcctttggtggtacgaattgatcattaatattgtagccgtaattgtcttaattggtttgggtgcaattttacctggaattagacgtcgtgaagaagaatacggtattgcttttgacaaatctcaatggatttggatgggaattatcattatcggttctattattcttgacgtatggcttggtagtaccaagattccagcaagaatcacaatgattatagttgaagctatcgctgcattaatcattacttggattgttggacgaagaaaaccccaacaagcaaccatataaaaactaaattacaaaaaagctcgcaaataatgtcattaattatggcatgctttacgagcttcttttttgctcaaattgatatcactttcactctatattctataatcatatagtaatttacaattattttgtaattttatatactcaacaaggttagcactaagtgttatactaaagtataatggagataaggcatatatttatagaattatttaaactgagactgaataaaatgaaaaatataagaaagaagattatagtatttctgctagccttggaatgcttagctttttgtatatcctttaatagcaaagtgtatgcatcatggagtcccgcttcagaatggaaagaaaatggctatcctactgaggactggacaacagatcaatttacataccatcaaataggatttattaatgatcctaaaaataatcaattgttgttatatgtagacatttgccctgattctaaaaccaatagaaatagtcatggatatgaaggtggatatcgtcaattgcagccatcagcctacaatataaatgttggtaatgctacatacagtgttaatttagatgtcaatccatggaatattcaaaatggaaaatctggatatgcaggaattggagtatgggatcctcaaactaatcaatataaagcaactaaagataatctctgtcattattatgcagatagtgatggccgccaatcggccataattaagattccttacaatatgtttaacagagatgacctaaacggatcaactaaaatgacaatgcaaaatcctaatttgggtggcaacacaaaaatcacaatcagcggagccagcaccggcccatacatccctgccatcatcgcttttgtcttagcttcaatagccgcaattagttattaccataaaagaaagttagtacgtcatgaacatcagtaaaatatccccaaaaatatttcattttggaaatggtgtcatccgtgcctttttctttggcttgattataattagcttcttcgctgtgctctcatctactaattggctgccagatgcaaaaactacgaccggcttaacttacataatgtttgcactactattaattttagttttaagctggttctcctttccaaagtttcaaatgttcttaaaaacaatttttatcaagcataaatggattacttctattatttgtttagtccttgcattaatttggcaaattcaatttgtctacttcgtacatcccgcaatcggatttgatgttagtgctgttcacaataccataatcaatccgaatctacctgaattaagaggatatttcagtgttaactacaacaacctatccatcctccttactctaagacaagttgccaatatctttcattcaaccagttggttaacaatggctttatgttcaacacttgttacagatttaagtgttttagtaatcatcgctacaattgcgataatcaattttcaaaaaattcccaatatcatttatattctagctagtctgcttagcatattccctatttgcatggttccttacacagatgtatggtgcttgctccctatttcactttcaatttttggctggagcatcgctacccaaaaatcatatctagttgtcattcgttttttaggagcaattttatccggaattagcttagcatgtggcgtttggatcaagccttcagttgctgtttggggtattgccgcgattttaacgagtttactctatattttaaaaaacaacaaagtaattctaacttctattttctgtttaactattgcagcaagttttgttttagcctatcaacctcttaaaaaagcggttcaagatcagcattacatcatcgttaatcaaaaacgccaaattccgatgatccacttcatcaacgttggtttaacacatgatggtgcctatgatccaaaagcagctttaaaaatggatgagcttcctactaagaaacaaaaagttgtctattctaaaaagatgatcatcaagcgtcttaaaaaacgcggtccattgggttatttacaatttctagttaaaaagcaaggtctaaatactgcagatggtacattcggctggctgcatgaaggccattttattatttccaagcagccatcagaaggctggcgaggattcttagcggaatttatctatccaaatggaaaatatgttattgagtttagatttatcgctcaaattctttggacaattattatttttgtattgctattcagttttcaaaaaggcggctttattattcaaacgctaagaatggcactagttggcggttttatattcttacttctttttgaaggcggacgtagtcgttatctagttcaattcttacctattatcttgattttaacagcactttcagcagacactgctaaatataatttagataaaattttgacagcaattctaccgaaaagaggtttttaaatatgaatcttagtttaatttaccctactatctctttaccaatcattacaattagcatggttgtaactcaaacacaaatagaaaaagtatgggagaaacagctagaagactggcgtcaccatttatttatcatattgtgttttactactttttacatactccaaactgtttgtattgcaaatgtaaccatctttacctttaaagcaattgcttatatgtatgtcattccaacaattatggtattacgcaacaagcaacatatttggtggtttttgctttttatcacaccactaattccgttacttattggtcttgatttaaagagatattcatttataaatatccccgctactttattgcagatttcatccatcgcattaatctgctttattctaaatcattgtcaaaatctttcatatcaagttaagtatatcattgccctttattcagggagtctcatccattttgtacgtctttatatagaaaatgaattacacctcacatttttaatcgctttgacaatcggaactactttcaccatcattggtgaaagctggcgttattattttgaaagtcgacatgaagaagcaactgctaaattgcattacgaaagcaagcgtgatgaattaactggtcttcttaactttcgcgcttttgaccaagaaatgaaaaatttatctaaaagacctaatataactaatacctatattggcgctattgatatcgatcattttaaagtaatcaatgatacctatggtcacttaaatggtaatattgttctgcatactttttctaaaaaactgaaacacgagattgataaagcttttgctcctaattgtttcgtttaccgctttggcggtgacgaattttcaattgtcatttttaatgctaatcctgaacaaatcatcgctgcactaaacaatgttgaacaatatttccgcgataattttatcaaacttcctgataataaaactaaaataaagttctcgttttcatgtggcttcacgaagcatttatctaatgaacatttttataacactcttgaacgcgcagatgatttagtttacaaagtaaaaaataatggccgcggaaaaatattgactgattaaaaaactaaggaaatgaataatgcttaatggatatttaattggcgggattatagtttggttatatgccctttcagtaactaatcgtgcacatttatttgctttttattattgggttggtgctattggtgcttttcttttaactacttttgcatgccacaaatattttgtctggttcctagctagcctagtgagccgcggagctggtgtgattggacagctgactcatagctttactgcttatccgtttccagctgctttagacattcaaactacttttggatcaattaccctattagttgactatgaatgttctggaattattgaaacattggcatatttaagcttattaattttctttcctatttacactcgtcgtcaaaaggttgctcttagcattatcggtgttttttggatctactttattaatatttgccgattaggtttaattgggataaccgttcattaccttaatttgcgaaccctgttctgggttcacgacgttataggacgtatctttttctatatctttacaattcttctatattatcaagtcttcactcattcacaattagtctcaaacttactagggcgaagcaaattagattaaaaaggaataatcatgtttgatcaaacagtattacaaatgggattctgggctacttggcttttaattcctgtcatatttgaagaaattccgatgataattaattttattcggcttcttcatcatcataaaattcgcaaaaaaactcctctgccagattttttgccagtattatcaattattattccgacttataattcatccaaaacactttatagatgccttaaatcgctagctgattcagattatcccaaaaatttactaggaattttcgttgtcgataatggcagcaaagatgacacctttcaagtctttgctaaagctcaaacggactatccacaattattgatgcggtggcttacttctcctcatggaaagtcttctgcattaaatgctgccatttataaagcaagatcccaatatatcattaatatcgatagtgacggtcggttggataaacatgctttaaacaacattgttaaaaaattctcggctaatccaaatatcgatgctttaactggaacaattttaactgatcgtcatttaattaaaaagccgcacaagcttttgaagttaaatgaatattttgaatattgccaaacctttctagcaggaagaaatattgaaaataacagcaatcatattttcacgctttctggtgccttttcggcttttaaacgcgagaccttaattagaacgtatctttacagtaccgatacaattagtgaagatactgacatgactttccaaatccggtacaatttaaagggaacgatttcattttgtgatgatgcaattttttattctgaaccaattagcggcttcagtgaactatatactcagcgacaacgctggcaacgcggtgaactagaagtcattaacaaatatttatcgcaagttttatcttggaaacaattcttcagtaattttcaaattcgtcgtttaatcattgatcacacagtcactttcctaaaaataatttggatgtttgctatttttatattattaggatttggctattcatggatatcattattgttttcttatgcggtaatttatcttttatatttatttttggagatttcgagttcaatttgtgtttacatatacttaggaagctttccagaagaaagaaaattttatcttaaaaatatttggatgatttttttactgcttttttataatttactttgttctttcattcgttgtgttgggattattaatgcttcaaccaccactacaacttggcaaggaattaatataattcaagaaggtcaacaggttaaccaaatcataaaaaaagatataagacaattattgaaaagaaaaaattatgacgactaaatatcatacttatatattcacaacttatttgaacgcatcacatgctattcgttggagtaaaggaatcgggcaggctcattcccatacttatgaaataaggtatagctttcatattaataacggcaaattgattcgtttcaatgaaattgaaaataagattgctgaaattataaaaaagtttaataatcaatttttaaatgaagttgagccattcaccaaagtaaatcctactttagaaaatttaaccgattatctattcaatcgtttcggcgaagaattaaataaattgaattgtagtttagatgaaatatctgtaagtgaatcaccaatgagaacttatcagatttcaattaggtaacagaggtaataataatgagtaagtggtataacgtttttcaacctatttatcaagtcgataaagatttaaatgtaacaatttcacattatgaaatgttattacgagatgaaaatgattccttcccaaataacgatttcttcagagtaattggaactgaagaagaaaatcaaaaatggattttagccgaaaaagagtcaatagatcaagcttttgctaagtaccctgatatctgtatcaatttaaacattgagcctattcaattcgcatacccaagcgtttggaaatttattgaaaatatttatagtaagtatggtaaaaaagtggtcattgaagtaactgaacgtcaacttcaagctggaaccttaggtaataaacaatttgataaatctttccaaagattccatgatattggcttggacgttgttttagacgatgttgattctggtggtcatagctttacttttgtagatcaccattctgatataatcagtgggatcaaattatcattactagacttcgatcctattagttctgatactactattaaatttattgatgcttgggctagctttgctaaggaaaaacacttagatctagttgtagaagctatcagaaataaggaaattgctcaaaaatttgctggtaataaacatattttccagcaaggttattactggcaacagggagtaaaactagaagacttaccaacggtttatggatttaagaagtaattacaaaaagacagaattgattgcttaattctgtctttttttacatgtatttatttaaaaatttgtttattcgcattttatattcatgcggataagtttcgaatgaacgcgcatgagctgcacttttggcaatccataactccttaggaccatttgtagcatgatagttttgatacaccattttagttggcacaaaattatcttttccaccatggataaatagcattggcttagtattcttttttaattgcttaactgcagatgcatcccctaaataaaagccaagatttgctttacttacaccgcttaatagcgtaactgcacttgtagctactgcttgcggcataccgtataaatcttttgcttcatgcatgaattcagctttcacatcactatacccacagtcttcaatatatgccttaacttgcttaggcatcttgaggccactagtcatcattgtggttgctccgcccatactgacgccaaaaattacaatctgttgttttcttccttcaattgataaatctttattgacccattttctaacgtcatatttttcaggccaaccatagccaatatacttcccttgactttgtccatgagcacgcgcatcaggaatcaaaacattatatcccaattgatgaaacatcgccgcatagggtgccatggtatttttattattaccaaatccatgcagcaacacagcagtcttttcagaatgcttatttggaatataatttgcatctaagcggtagtttgaagaagcagacttaatataccaatgctcttttttagcgtttttataccactttttattctgcgcaagtgaatctttctttttcttgctagaatatttattcagcactgtcttttcacctggaacaaaagcaacattaaagaaatatgcttcaactgctccaattaaaacgattaaaactgtggcgactatccctattatccaccatacttttttgcgttttctattcaaaatgtcaactcctatataaaataatatagaattaattatacacttttgaattttatatggtatattgacattttaagtaaaatattgcctatacaaaaaatgatggcttacgccatcattttttgttattaatctaaatcttcaccgtgagattcaattaccttcttgtaccagtaaaatgaatccttaggcattctcttaagagtacctttaccttcatcatcacgatcaacatagataaaaccgtaacgcttagacatttgaccggtaccagctgatacttcatcaatacagccccaagtagtgtaggcacggacatcaacgccatcttcgatcgcacgattcattgccttaatgtgcattctaaggtaatcaatgcggtaatcgtcatgaatcttaccatcatcactaatcttatcaacggcacctagaccattttcaactaccatcattgggatttcgtaacggtcatacataacttcaaggtagtattgcaagccatctggatcagttgcccaaccccattctgaatacttaaggtatggattcttagcaccagcggcgaagttaccgccaaccttatcttttacttcatgagttgtgataacgttgctcatgtagtaagaaaaggtgtacatatcaactttaccttccaacatatccttcttatcttgctcagtaatgtctaagtgaacattgtgttctttccaaagacgcttagcaaatgttggatacttacccttgcattgtgcatccccacagtagaaaatattttgttcccacatatggcggttagtcaaaatatcctttggatctggggttaatgggtaatcaacgattccacaaatcatattccctaccacataatcaggatcaatttcatgagccaacttaactgcccgagcactagctacgaattgatagtgcaatttctgatatgcatgttggtatgccttatcatcagtcacattattgccaaaagcactaagcatcaacagggttgaattgatttcgttaaaagtaagccagtacttaactaatcccttgtattcttcaaacaaagtcttagcatatttcacatacatatcgatcattttacgatcttgccagtcatgatatttttcactgaggtaaagtggatcttcatagtgagaaatagtaactaaaggttcaatatcatattttttacattcttcaaatactctgcgataaaagtcaagtccagcttgatttggcttttcctcatcacccttagggaagatccgagtccaagcaattgataaacggaaggttttgaaacccatgtccgcaaacatcttaatatcatctttgtaatggtgataaaaatcaatcgctacatggttaggataatattcattaggatcaattgcaccaactgccccttcaggaagtcccgcacctggaactcctggtgttttttctaacttaccatttaacttgtaagtcaacattctaggtgcatctaagctacctgcagtagtaatatctgttactgataggcctttaccatcttcatcatatgcaccttcgatttggttagcggcagttgctccgccccataaaaagttctttggaaatgacattatgattctccttttctgaaagcatttacattaattatagactaattggtttgaacttgaccagttgttttaacttctgcgttactgccttgcaaagacaaaatttcttgaccaactttaacttcaccttgagctacttgctgtacagattcatatttcttagaattcgtaacaacaactggagtagtcacttcatagccagcagccttaatttctttaatattaaatttaaccaatggatcacctgctttaacctcttgacctttttctactaaagtcttgaagcccttaccttgcagattaacggtatccattccaatgtgcattaacacttctgcgccatctgtagtgttaagtccgacagcgtgtcctgttgggaaaactaaagcaatcttaccatcagctggggcatgaagcacaccttcgcttggttcaatagcaacgccttcccccattgcaccgcttgagaatacttcatctttaatttctgacaatggttttacttcaccgtctaatggtgaaactaatttggttgaaggattttccttttcttcacttaaaattgcttgtacaggagcactcttagtaatattagctgcttcattagcggcgtcagcaactttttgtgcttgttttttattatattcagcatcaactgattttttaccaaagagcatttgaagtgcaaaaccagctataaatgctacaataccggcaataattacgccgacaattgttgtcattgatcctcccttaggattaatgtaggccggaattgcaaagaatcccattgatggcataatgtacaatactgaatgaaaggcaccaatgattgcacctgagactgcaccagcaatacagcttaaaacaaatggcgtttttcttggtaatgtaataccataaattgctggttcagtaacaccgaacagtcctgagaaaaatgcaccagtagctgtttctttaagttttttgtccttagtttgacggataatagctaaaacaacaccaatttgcgcataacaaaccatgcaggataaacctagaattgggtcataacctaatgcggctaaatctgcagtagttacggcaacgattccccagtgaacaccgaaaataacaagtacttgccaaagagcacccattaataaaccagcaataattggactaaagttgtaaacacctgacatcactgcaccaattgcgtccccaacccaagtcattacaggaccaattactataaatgcaactggtaaagcaataatcatagtgacaactggaaccaagaacatttgcacaactgatggaatccactttttagcccagtgctcaataattgaagcaaaccaaacggtaaataatactggtaaaactgtagaagtataattcatcgtgataaccggaatgccaaagaaagtcgtgtgaatctctgaggcaaaagccgttcctttaaacaatgtacctagaacagtcttacttgcagctaattgaaccatagttggataagttaaggttgcaccaattgctaatccgataaattgattcatgtgaaatctacgtgctgcagttacccctaagaatactggtaagaagtagaaaatactatcaccaattgcatatagaatttggtaagtacccgatttagtagaaagccatcccattgcgcctactaaaactactaggcctttaataataccgccagcactaagtggagctagaatatctgtaaaaatgcctgaaatcaaagcaacggctttatccacaaagctagaattatcttcaacgtcatcatcaggaacttgtccaccgccattaaagccgccttctttgacaacagcatcgtaaacatcagcaacttcattaccaatgaccacttgatactgaccaccagctttaacaacagttacaacaccatctgtatcttttaaaacatcatcgttagcctttttttcatcctttaatttaaaacgcaaacgagttgcacagtgaacaacactggtcacattatctttgccaccaacattttgaatgatggtcttggctaattcatcatagttcttagccatttgcctttcctccttaaaataaaaacccaagctactcaaaaactaaagaacataaatgttcaacgtctttcagtaactcgggttcatgcctaatcttcttagtaacatacctaagtaacttagatatttaattatcttgacgactagttacgcgccaaatatgtaaaacaagataaaattcatcatctgaatctaaatcccatcccatttttgcatgtaagtaagtggtgatccgctccgccgtctcatacgctttgctatatttgattttcataaaacctagcattgcaggatcaagtgaagcctcctccttttgcttatttcgtaaaaatctaactaacaaaatgcgcaaatgcgaaacaaacctactatagttaaaggagctcgtatcaagttgcattgaatattgcaattgaataatatcgattatcccacgaatcaaatttgtaatctgaattgtttcttgtacttgagaaacatcactcttagcattaaccaggtgataggtcatcaaaaccgactcactctgcggcaatttaatctgcatctcctgattaattagattgaccacttttttagctgccgcaaattcttttggaaaaagattttgaacttcccaactattgttagcgggagctatatcaatatgatctttaattcgcgtaactgcaaaatcaatgtgatctgctaaagcaagatactgaaagtcattgaacttaatctgaagcagaggttcgaccagctgaagtaccttattagttacttcaattgttttagggtcaaagcccttaacttgattcacttcgtctttagtaacgaagcgacgttcaattttgctttcatcaacaggatcacttttttttagaccaaatcctacgcccttgcctaggactatttcttcttgaccttggttattttcaattaaggcagcactattattaaatgttttaagaaatttcataataattcaccaccttagcaaaaaaagaaaaagctatcacaaataatgatataccaacgcaacattatttgtaatagctaagacctgatcgtatcagtaatccgctcacttacagttattataatagccaacattgtaagcggtgtcaatataattttgtgaaaaaatgcaaaatattttacaatgaactaaaaagcgaggtaattaaaatgaaattcgttcttgcacctgattcatttaaagaaagcatgacagcaaaagaagtctgcattgcaatgaaaaatggtattcaaaaagttattcccaatgcacaaataaccgcagtaccaatggctgatggcggcgaaggtacaactgattcattggttgacgctacaggcgggcaaaaataccaaataaatgttaccggtccgcttaatcaaaaagtatcagcttattatggcatctcaggtgatggacaaactgcaatcatcgaaatggcacaagctagtggtctctcttatgttgcaaaaagtaaacgaactcccgaaacaattttaaagactacaacttatggaaccggcgaattaattaacgcagctttgaagcaccacgttaaaaagattatcatcggcctgggcggaagcagcacaaatgatggcggtgctggtatggcacaagcacttggtgttaaattttttgatcaaaatcatcatgaaatcacccaaaagctagcaggcggtgctttagatcaaattgtcaatattgatctttcttcaattaatcctcgtattaaagatacccaatttttattagccagtgacgtaaccaatcctctaactggacctaatggtgcaagtagcgtcttcggcccacaaaaaggcgcagatgatacaactgttaaaattctagatcaaaatttatctcactatgcacaagtaattgagcagactattgataaaaacgtcgcccaaatttctggtagtggtgctgctggcggcctaggcgctggcctgatcgcctttactaacgccagtattcatccaggcgtgcaattaattgcccaagaaactaagcttgaagccaagatcaaagacgctgactatgtttttaccggcgaaggcggaactgattttcaaactaagtttggtaaaacaccctttggtgttgctaaaattgctaaaaaatatcacattcctgttatttctttagcaggctatttagatcaaggtattgatcaactctatgatgaaggatttaccgctatatttggcattcttgctaaagcagaagatattgagcaagccctaaaagatggaccaataaatgttacccgtacaactgaaaatattgttcgtttaatcgcacaaaaataagatgagctcgatgcccatcttattttatttcgttaatttcttaattaagccttcacagccacgataaatttcattatacgctgtttcaaaatcatttgtataccaaggatcatcgacatcagcataagagccagcaaactctaaaattttatgttctttatgctctgggtctccaccagtaatgcgattcatatctgcgaaattttcttcatccatgcagattaaatattcataattatcatagtctgagcgagtcatttgactagcacgatgaccacgatcatatggaatatgttttgcaactaattcccgttgtgcacgagcatcaatcccatgacctaaagcatcctgcgtagttgctttagattcagcagtatattgatctgctaggttattttcttttaacaaatattgcatcacggcctctgccattggtgagcggcaaatattgccatgacaaacaaacagaatttttttcattaccttttcttcctcttagttagtctatttataaccggccaaataatcgccgtaataactccaactgttaagccaacccaaatctcctgcgacaaagttacaagaatgccactataaactcgactttgcaatgcggtcatcgcctcatttgaggcaagccacaatgccacaaatgaagcaatagtagctagtgctagtggaattgacgccgaagagcgaccaaataaaatcaaaattgcggctaacaaaaataacaaagccactgcaaaaattgaatactcataaattgtaataatatggttcacatcttctgaatcttccttcaatttatgattaatttgcttgactaaatattcattgataatttcttccaacttacttttactagttaagcctaaatctttagtggtcaattttccctgatcattatatttttcacacaatctatatagatcagcatatgataagttaacttgatatttcggcggcaattgttctaacaatgtcttttccaaaccagatgcttcgagtaactcaacccctgccttcaaattaggattatctgagtcatccactactcgattgattacttctttgcccatcgcctgtgtatcgtttatttttaaattcacattgctagtcattaataaccaaaaagatactgcggctaggccgaccattatcaaacgtagtattattttgacgatgttcttcatctaaaaatcttcccctaacatctacttttttcagatggcaaacaattgcaaggcaccatgtcaggagcatccttttctttcaatttaagttcttgctgcatcgtcttaatatcgcccttagaaagcggtgcttctcttagcaactgaattaatacctcacccttgtgcatatcacacatgttttgcatcatatgtaaagtaacttcagacatcattttgcgctgactaatagtcggcttataaacaaaacaccggccttctttacgcgtctttagcaagcccttttgcactaaacgccgcattagcgttttaattgtggaatcggaccaatcctttttaccttgtagttctttgattacttggccagtacgaacttctcctaaggtccaaataatacgcataacttcccattctgattgggtaatggaattacgatcgtctttagtttctgccataaaacatcacttctaaatccaaattttttactaaagaacaaattttttcaaagcctttgcaatcccgttgtgatcattatcatcagtaacataatcagccttatctttgatctcactaatggcgttacccatcgctactttcatgaagttgggattagaaaacatcgaaagatcattgccttgatcaccaaaaatcatcacgtctttttgggcaatttttagccgtgaagccaaatccattaaagcattaccttttgaagctcccaaggcatttaattcaataatactgtcaaaactgcgaacaatgtcataagtctgaaaagcccagtcggggaaactattccacagtttttctacctggtcagctccttcagttgaagtaaaaccgactttgttaaaagtaaaatcttttggaatttcttttcggtctctaactttcataatattatcggtcaaagccgcattaatttgcatttgcacagataaatcccgatcagttgtaatgaaatacttagtcgtctcaaaatgtacatttacatgacttaaacgctgaaaacgcaacatattattgaagtcttgataattcaattcctgactcattaaaacacgaccagaaattgtttgaattactgcaccattaaagacgattgcatattgatcatcaccttcaattcctaattgcttagcaaagttcaatactcctgataatggtcgtccagtagctaaaacaaccttaatcccattttgtactgcgacacgcaacattctttgcgtttctggcaaaatagtattattgcttgataataaagttccatctaaatcaaccgcgatcaatttaatagccattttaatccctcggatcttaaaaattacatctagcattaattatacaaaaagccgtgatttaactcacgactttttacttatcgattattcaattaggattttacttacccatttccttttcgaccactttaacgatacggtctacataggcatcagtttcttcttgagttggtccttcagccattactctaagcaagtcttgagtacctgatggacgaacaagtacacgaccatttccagccatatccttttccactgcagcaatttcatcaagaattggttggtgttctttccagctcttcttgtcagcaaccggaacattaactaggcattgtgggtaatctttaaagtctttcaaaagttcacttaatgacttaccagtcttcttcattacgagcattaaatgcaaaccggttaacataccatcaccagtattatgataatcactcataataacgtgacctgattgttcgccacctagattgtagccgtgagcacgcatttcttcagaaacgtaacggtcaccaacttgggtacgaacattcttcaagccttctttttcaagagccttagtaaaaccaagattactcattacagtagtaacaatggtatctttcttcaaacgaccatgttctgccaagtatgagccgagtacgtacatgatgtggtcaccatcaacttcattaccattttcatcaacagcaatgcaacggtcagcatccccatcaaaggctaaaccaagttgagcaccttgcttaacaacttcttcttgtaacttttcagtatgcgttgcaccaacatgatcgttaatgttcaaaccatctgggtgagttgcaatagtagtaaagtcaacgccacaatcagcaaacagtcttgagatcaatgcgcttgaagcaccgttagctccatcaataactaccttaattccacccaagtcttctggaatagtattttcaataaattgcaagtatttagctgaaccttcgtggaagtcagttacagtacctaatcccttagcagatggacgaggtaatttatcttccttagcgtcaattaatttttcaatttcgccttccatttcatctgaaagcttcaaaccatcgctaccaaagaacttaatcccattatcttctacagggttgtgtgaagctgaaatttgcacccctgcatcggcgccttgtgctcgtactaagtatgaaagacctggagtagtaattacgccaacctcaagcacttcaatcccaactgaaagaaggcctgaaatcaaggcatattcaagcatttggcctgaaatacgagtatcacgagatactaataccttagcttgttcgccgtcttttttgttcttagttaaaacataaccaccatcacgacctaatttaaaagccatttctggagttaagccttgattagctacgccacgaacaccatcagttccgaaatattttaacatttaataaacaacctttctcaaattaattattcgcattctttactttaattgatatctgtacattttcaggatcaacgcgagcaactcccttaggtaaaactaaagggtaattctttacagttgaatatgagattcctttcagatctacatcaacatccaactgcttaatctttgctaatgtttccttttgtccatacagtgttacctcatcattcttggcagtaaccgaatagactttattatttttttcatttttaggctttaaatttagcttaactttctttttgaaaagcgatattggcaaactagcttttactgtagatggattaatcactgcatttaattgacgcccttttttatcttcagctatcaaaataacttgacgctcataatcatgattaatgccattaggtaaaggcaacttggcaacgatctgatcaatctgatttacttcgcttctagcaccagtaacctcaacttgctgcggatcaacactagccgtaccaatattatatccattagcaacagcatttttattatactctatttgaacgggcatggtacgagattttcgccgttcaatatcaacattaactgttgccgggttaatcgtgtaagataattgactatttagtcccgtaacttctacctttacggtttgcttacctattttcttatgagttagatcaatataagcacggaagctttgagtattaacagtcgaagtaaccaacgcattcgaaccctccaaagttatcttaaccttttcaggataaccaacaacatagtatttatctgtattaaccgaaacttgcagaggaacactaattgtctgcgtttcattagcagtttgccgtgtcttcttagattcaccctgtgtaacaaaacctgtttgagtagagtcaatgtaaaccactaataagatcgcaaacagcaatgagattattctgattacccagcgtttatcccaaaagtctttcatcgatctgcaccccatttccagactttattaatcacacgacgaatccatggaaccttcttctcttccttaggaacaagttgagcattcaaatacttcaaatattcttcacgagacaaatctactaaaaagcgcccgtttctagtaatagttacgccaccagtttcctctgagacgacgatcgttaccgcatcggtaacttcagaaataccaacggcagctctgtgacgcgtgcctaaacgcttaggaatcatgctgttatctgacagtggtaaatatgctgctgcaacagcaattcgattattattgataattaccgcaccatcgtgcaacggcgtattagggataaaaatattaattaataattcaccagaaatatccgcatccagcttgattccagtttcaatataatcatctagccccgtatcttgttgaatcgtgattaaggcaccaattcttcttttagacatgtattgaatcgctttatcgagctcctgcaccatcttaaccgactgtgtatgagcactctcacctcggccattaaaaatcggcgtgcgtcctagccgctctagtccacgacgaatttccggctggaaaataacgataattccgattactgcccaagaaacaatttggtccacaatataagttaccgcatgcagttgcagtaagccggcaataattctaacaataaagataaagacgatcccttttgccagttgtactgctttggtaccacgaatcatcatgatcaaacggtaaactaaataccaaatgattaaaatatctaaagcaatggagaaattattccaagtaaacagattagaaatattaaaatgcattgattgctcctttcttctttaattataaccgccccaatttaccgtgcatacattttaaattctaaaaataggtcattatattcttgggtcttcttaggacctaaatctctaaagacctgtagattcttcaacgtactttgagtaggataaaactgccggtcatctctaacttttttcggcaataatttttgggctgcggtatttggggttgcatatccaacatattccgcattttgcgctgcatttttaggttcaagcataaaattaataaacttaagtgcagcttttttattttgtacagttttaggaataacaaaattatcaaaccacaaatttgatccttgcttaggcacaacataatgcaagtgaggattttgttccatcatttcataagcctcaccagaccaggtaacgccaattgctgcctcattttgcactaggtacatcttcatttcatctgaaataatcgccttaatattgggtcccagactattaagcttagtttgtgccaaatgtagtttaatactagatgtggtattcattgaatatcctaaagaaaccaatgccatccccattgcatccctagctgaatcaactagtaaaatttgcctgcgatactttttactccacaggtcattccaagtcttaattgcccctggcttgacgaatttatcattataaacaattcctagtgtcccccagaaatatggcacagaataatcattattttgatcaaatgacttatgtaaaaaactcttgccaatatatttcaaattaggaatttgcttttgatccaactgatcaagcaaatgagccttgcgcattttagttaccatatactcagaaggaatggtcaaatcatatgccgttccgccttgtttgattttggtatacatcgcttcattggaatcaaaggtctcatagacaacatgataacctgtctgcttttcaaacttttttattaactttggatctagatagtcgccccagttatagataatcaagttttgtttatttttcccggtagacgatttctccaaatgatgggataaaccccaaaggcctgcacaggcaattaaaatagctgcaattgccatcataatctttttcatttaactaggcctcccatcacacgatgatttttctttctgccctttttagtagtaataaaataatagattcctacaagcaacaagacaaaaatgaacattacggtacttaaagcattaatctcaagatcgattccttgtcgtgcccgagaataaatttcaactgaaagagttgaaaaaccattcccagtaacgaaaaaagttacggcaaaatcatctagtgaataggtcaacgccataaataaaccggaaaagatgcctggcataataactggaattaaaacatcactaaaaacctgccatgaattcgcccctaaatcacgtgctgcatcaataagcgacatatccatttcattaagtcgcggcaagaccatcaaaaccacaatcggaatagaaaaggcaatatgacttaacaatacagaaccaaaatttaagccaattcccaatgctgtaaaaaagatcaaaaaactagcaccaataattacatcaggtgacaccatcaagacattgtttaatgctaaggttgttttcttattagattcttttttcatcgcagcaattgcaattgcaccaaatgtcccaataattgttgctattaaactggacaacagcgctagtaggatagtttccaaaaatatcgctaataagcgattatcttgaaataaagtctgataatgagcccatgtaaagtgctcaaatttattcatgtttttaccactagaaaatgaaaagtaaatcaaataaaaaatgggtacatataataggatcaaagtaaaagcaagatagatcttagcgattaaatgtctgtttctcataaatctaccttctttcttctagcctttttgctagtaatcaacatgactaccaccatcagcgcgattaaaattactccaattgtggcccccatattccagttcattgtggtcataaaatactcttcgatagcagtccctaatgtgattacccgattgccgcagatcagccttgttaacataaataatgacaatgatgggataaagatggcctgaacgccgctttcaactcctggacgagaaagcggccataaaacatagcgaaaagtttgccatttactagcacccaaatcctcagaggcatgaatgactgcaggattaatctctttaatcgcattaaaaattggcaaaatcataaacggaatttcaatgtaagtcgccacaaaaataaaagcaaaatcagtaaacaaaatatttacgggaccaataccaaataaatgtaaaaatttatttactaaaccgtcattacctaaaatgccaataaatgcatatgctttaagcagcaaattaatccatgttggcaaaatgatcaataacagccacagctgctggtttttcattttaattaaaaaatacgctgccggatacgaaattaccaacgtcaacaaggtgatcaaaaatgcataccaaaatgagttaagcatcatttttaaaaaggtaccatttttaaaaaattcaacgtaatttctgagcgtgaatgcgttattactatcagtaaacgaataccagagaatcaataaaatcggcaaaatgacaaagagaataatccacagcagatatggaatcataaaaaacatctttttatttttcattttcatccgcctcatacttttctagtcgagcatcaaaatcgtgttggctttcatttaaccgcatgacgtgaatatcttctggatcaaaaaagagcccaacacgttgtcccaatttaactccattagtagaatggatcagccattcattttcattggcatcaattgccttaatctcaaagtgatcacctaaaaataattgcgtctgtgctgtaaccacaatcttcccatcttctggtttaacaatatccaagtcttcgggacgaataactacttcaaccttttcattaggcttcatcccaccatcggcacatttaaatttattattagcaaattccacttcgtaatcatgaatcattcgaccagataaaatattggagtcaccaataaaacgtgctacaaagtcattcactggctcatcgtaaattgctaccggattaccactttgttgaatctgcccatcatttaaaacaaaaatttcatcactcattgatagagcttcttcttgatcgtgcgtaacaaaaataaaggtaatgcctagctttttctgaattgcccgtaattcaaattgcatgtcttttcgtaaacgtttatccaaagcagatagcgactcatctaatagtaaaaccttaggttcattaacaattgcccgggcaatagctacacgctgctgctgtcctccactaagttccgaaatttcgcggttagcgtaaccgtctagacgaaccatatgcaaagcatctttaacagctggcttgatttcactcattggtcttttcttaattttcaagccaaacgccacattttgaaaaacatccaggtgtggaaacaaagcataattttgaaaaactgtattgatatgtctttttgaagcatcaaggtcagtaatatcattaccatcaaagaggacttgaccactagatggctgagtaaagccagcaataattcgcaaaattgtcgattttcccgagccactaggaccaagtagtgaataaaatttaccagattcaatagttaaatttatatcttttaatgctacaaacccatcatcatattttttggtgatgtgttttagtttgataatatccatttccatccctcacataaaaaacagctgcaagccttccagcctgtagcttgtctttgctaaaatattttacttttctttgccgataatcctaacttctgtgcgtaagtcaatgtcaaacttttctttaattaccttttggatcaaatgaattaaattcaaataatctgttgcagtagcaccgcctttattcacgataaaacctgcatgtttcattgaatcttgagcgccaccgatttgtttaccttgtaaaccagctttaataatcatcggaccaacaaagtgcccagtaggccgcttaaagacactgccacaagatggatattcaagtggctgcttataacgacgtaaagcatttaaataatgcatatgatctaagatctctaacttatcgcctgacttgagtgcaaaagtggcgcttaatacaatatcgccattttcttgaactaatgaatgccggtaagaaaagttcatttctgcgtttgaatatgttttaaattctcctgctctggttaaaacattaacgctttgcactacttcttgcatctcaccgccataggcaccagcattcataaaaataccaccgccaatactaccaggaattccagcagcaaattccattccgctcaaaccatgatgagcagccgcaaaagctgtatcgataatccgtgcaccagcatcagctgtaacttgattatcttctactttaatctcttttaattcagtcaaaataattactaacccatcaattccgccgtcacggatgattaaatttgaggcattgccaataattgttaatggaatttcattttcacgtgtgacttttactaattgttctacttcatcagtcgtcttaggaaaggccaaatattcagctggtccacctgtcttagtaaaagtatatctgcttaatgggatttgctctttaatatcaatccctttttctttcaaatcaagtaattccacgctgttgcctccttaaagtttcttgttttattttaccgcataaaggcgttagcttcattaatattaatgatatacttttttaaaaggagaattttatgaattttattgcaatggactttgaaacagccaaccattatccagaaagtgcctgttcacttgctttggtaatggtgagaaataataaaattgttgatcgcttttatacagtaattaatcctcaaatgccatttgacgcgcgaaatattcaagtacatcaaattacagctgaggacgttaaaaacgctccaacaatggcagaggtctggccccacattaaagaattgtatcaaccaggaatgcttgtagccgcacataacgctcgctttgatactaatgtcatgcggcaaagcctggcacgttacggtattgaggagccccactatttggtcattgacactttagctagcagtaaattactcgaaccagaactgcctgaccacaaattagacacagtttctgaggccttaaacgttgaattgtggcaccaccataacgcattaagtgatagtgaagcatgtgctgggattttaatcaagcaagaagagcaatttggtgatgaagcaatcaaaaatttggtttatcagatatgaaaaatctctaggaattttgatcctagagatttttgctttacttattaaattcagttaacgcagctttgacccattcttcattgcgcttaccatgaggagtaaattcaacaacccgtttagttgaatcccaactatcgtccactctggtaatcgtaagttgcaaatactcatctggcaaatcattcattactagttgtggccattcaattaccactaaacctggttctgctaaatagccctccaaatcaatcgaggataaatcatcattttccaaacgataaaagtccatatgaaagagcggcaacttagcttctcgatattcacgcacaatggtgaatgtaggactcttaacaggccgatgtatgcctaatgctcgccctaatccttgagtcatggttgtcttgcctgcacccaaatcaccatttaatagtaataaatcgtagggctgggccgttttggctagggatgcacctaatttctgcattccatcagcagaattaatttctaactttgtcattacttttcatcctttgctaaagcttgtgcggcagtaacaattgctaaatcataaatatcttgttcactgcagcctcgagataggtcattcactggagctgctaaaccttgcaaaattggaccaacagcagtgaagccacctaatctttgaaccatcttataaccgatattgcctgattgtaattctgggaaaacaaagacattcgcatgtccagctacctttgagtttggagccttcttttcactaactgcaggtacaaaagcggcatcaaattgcaattcaccatcagctggaatttctggatgatccttttggaacatagctgctgcatcatgtaccttatcaaccattggtccttcggctgaacccttagttgaaaagctcaaaaatgcgaccttaggatcaatttcggccatcttggcagtcagagcagattgatagccaatttcagctaaagtttcttcatcaggattaatgttgatggcacagtcggcaaaaatgtaacgctcatcgcccttttccattacgaaagcgccggatactcgatgcatccccttagctgcatgaattaattgtaaagctggcaaaacagtgttagccgttgagtgagcagcaccggaaaccataccgtctgcttttcccatcttcaccaacatggtaccaaagtaattaccttgggctaacttgagctttgcttcagcaatactggtatcttttcgtctagctttaacaaattccgctgccatttgatcaagttcatcataatgattgaggtcatagatcttaacaccagctaagtctaaattattttctttaactaacttagcaatctcatctggatttccaattaaaattggttcgataatgccatcttttttcaaattagctatggcagtaagaattcttaaatcatcgccttctggaaaaacaattcttttcttatcttttgctgcttcaacttgttttttgaataatgaaaatacgctcattttttacctcttatgctaaatcagatttacttatcgtttctggcaattgccagtcaatcggcgtttcatcaaagttcttcaatgccatattacaccgcgaaaacggtcgcgagccaaagaaccctcgatcagccgaaaatggacttggatgtgatgatttaatgataaaattcttactttgatcaattaatggaatcttgttttgagcaaatcgaccccacaaaataaagacgacttttccacgctcactcagagccttaattgcagtatcagtcacatcttcccaacctttgccttggtgaccgttagcatgcccatacggtaccgtcaaaaccgcattcagcaaaagcacaccttgatcggcccacttttttaagtaaccgtgattaacaggccgagctccgacatcatcatagagttccttatagatatttttaagtgatggcggcaaagttgtacctggcatgacggaaaaactcattccattagcttgaccaggattatgatatggatcttgacccaaaattaccactttagttttagcaaacggtgttaatttaaaagccgtaaaaatatgatacatatcaggataaatttgtttagtagaatattcttcttttaaaaaattatgcaattcgtgatatttctcacttgcaaaaacaggatccaatacttgatcccaatcgttgccaattaattctttagccaagtcttacaccctcttttcttctcctctttatggtatcattaatttaatactaaatgggagagaaattatgatcaaattagttgcttgtgatcttgacggcacgttgtttaattcagagatggctgtttctgctgctaatgcaaaagctgtgaaaaatgcacaaagtagcggcattgaatttttaattgcgactggccgggccccacgcgaatcacgttcagttctcaaagatgctgatttgcataccagttttatcaatcttaatggtgccctggtttttgacgaaaatgagcaattaatgatcaaacacagtattcccaaggcaaaagcacaacagctagtgcatttactacatcgatcaggcttttactttgaaattttaactgccaatcaggtttatagtgaaaatctagatcaacgtatttcaaatgtagctcatttaatggtagatctaaatcctctacttgattttcgtcaagctgtagcaatttctgctggtaataagactattatgaatatgaaacaaatccacagtttcgataatttattgcaagatcctaaaatagaagtaatgaaaattattgcttttgactctcggggacatgaagcttttaccgatatcaaaaaagaaatcgctacaatgggcgatctagtagtaacttcaagttcatcttctaatattgaaatcaatgagcaacatgctcaaaaaggtcttgccttacttgattatgccaagttaaaaggtatcgagcctgaggaaatcgctgcaatcggtgataatttaaatgatgagagtatgatccgagcagcaggtactggcgttgcgatgggtaatgcgattccagctattaagaaaatagctcaggtagtcaccaagcgaaacaatgaagatggagtagcttatattttaaataaatttattgcagataataacaatatttaaagttatgaggtgagtaagtatgcgattttggctagaacttaatcaggaaaaggattacggtcaaattcctgtgcttaatcaaaatggaaaagctgaattttttattcaaggcaatcttgataatccaaaccacactttatatctaaataatttccgtaaacaggaagtgggacgtctgttttctgatggtgcgggcctaattgcttcgttcacaattgatgtcgtcaaccactctttagtaggcgtaaaaaagttaaacacacctactgcaaacatattctatttgacccaattaaagtatattgttacaggtagtattaaacgtggtacttatacttttcgttctggaatcaagagtgtagcaagtgtccaaacaatcatgggagatcgcggaggcgttttaatttgtgatattactaagcctgaagacgtcccctttattcttttgacatccgttctatttacacaatggcatgttacgcctttgaaactgcctagttttccgccaattggatttgaggtaaatccaaattaaacaaaaaagcagtcatgaaaattttcataactgctcttctagaaagtgatatagatatagatgtatcttctgccataaagtttatatttattaagtaataaggaattattaggcagagactgaataatgaaagttaaatctaatttgattcaacctccatagcttattatacttcgttcagccaaaaatacaagggctagatgttattattttactttaaagatagctaaataatgcatttagagctagcttatagcttaataatttgttatttaacttagtacatctatttttctaaacaagacaactttaatttctacgtaaattgcaataataaattgaacacttttaatcaagctgcttgatagattagatctaattctctttcaaagatttcatctggtgtatgatatgccaatatctttcttggtaaagagttgcaccaggtttcaatgtctatgatgtcttgtagtgaataattgtctattgcctctcccttaggaataaatctgcgaatgagtccattatgtctttcaacggttcccttgtcacaagatgtataaggatgagcatagtaaactaaagtatttgatacgtcttctaagcttgaaagatctgcaaactctgagccattatcagtggtaatggttttaaaaatatcattccaatgttcgctgtattgcctttggagttctttaaaggcctgcatgacactgacagaagtcttgtcaggaatacgaagaattaagaactcacgactcatacgttcagataaggttagcagcacctcatcatctttgctcttatgtccgagaactaaatcgcattcccaatggccaaactcattacgtttattgatttctttaggacgttcttcaatgcttctgccaagttttttcttatttctgcgaatacgatgaagcttggtattgcgtttaagcttctctggcaagtcgtaattatgtatatctaatagaccttggtcgacataattgtaaagagtcttagtacagacaacatctctgctgctaaatgcgccaacagcggtggcgcgattactgcacacatcaagcgaccagccgtctttaaagaaatgtttgtggacatagcgcatgaattgagttttcctgagaaagtctgatttacgtccacaatttttacgatgagcttgatatgcatcatgcccttgagtagccttatatcttttgactttgccatgatacagttctacagtaccgcgcttaacctcataactgatagtagaaggggaacagtttaattcacgggcaatggcacgcaaagaatagccatctttcaaacgcaattgaataataactctttcctcgaatgataaatgcttgcctttaatgtgatgattcatggtagaatgtaaagagtccattttgacctcgtttctaaatgttgtgtggtaactacattctatcaaacaggtccgaatggactttttattttttattaagtgttcaatttaattttacaatcagcgactttaatttctattaaaaaatatagtgaaatgatcaagtgatttatcaatggcttgatcatttttatttactttatcaacgaacttgtttttagctatcaaactatataaaaaagagccaaatctaatgatttgaccctaaaaattctagattattaatctaaattattttttatgaattagtcttggtagtttaccaattctaagaatgattctggtactaatgaagcaccaccaaccaagccaccgtcaatatcaggcttagccattaattccttaacgttagctggttttacagaaccaccgtattgaatacgaacgttttctgcagtttcttcgttgtacaagtccttaacagtttcacgaatagtcttgcacatttcttcagcttgatctgatgaagcagtcttaccagtaccgatagcccagattggttcgtaggcaataacaagtgaagatacttgttcagcagttaagccgtctaaagcagccttaatttgagcaactacccagtcttcttgcttgttagcttcacgagtttcaagtgattcaccacagcaaatgattggcttcaagccattagcaaagattgccttagccttcttgttaatgtcttcgtcagtttcgtggaagtaaccacgacgttctgagtgaccaataattacgtagtccatacccatttctttcaagaccttaggtgaagtttcaccagtgtaagcaccttcgtcttcaaagtaacagttttctgcaccgatatgtaagtttgagccttcagcagcttttctcaaagcgtcaaggtcaactgcaggtgcacaaataagtgattcaaccttacttgggtctggtaacttatccttaacagcgttaacgaattcagtagtttgttctggattcatatgtaacttccagttaccagcaataattggtgtacgactcattaatctattgtcctttccttactattacttgtctgaaacgcaagcgatacctggcaattccttaccttcaaggtagttaagtgaagcaccaccaccggtagaaatgtgggtaatcttaggagcaatgcctaattgcttagcagcagcagttgagtcaccaccaccgatgatagtagttgcatccttaaggtctgccaatgcacgaccaacttccaaagtaccttcagcgaagttaggcatttcgaatgcacccattgggccgttccaaacaacagtcttagcatccttcaagatttccttgaacttttcaacagtcttaggaccgatgtcaagacccatcatgttgtcaggaatatcatcaccaacaacttcacgtgaagcatcatttgagaattcagttgcggctacgttatctacaggaagaacgatcttgtcgccagccttagcaagtaattccttagcaaggtctaccttgtcagcttcaaataatgatttaccaatgctgtggccttgagctgctaagaatgtgtaagccataccaccaccgattaaaatatggtctgacttaggaattaagttttcgataacaccaatcttgtctgaaaccttagcaccaccaagaatagttacgaatgggtgtactgggttttcaacagcatcacctaagaacttgatttccttttcaagcaagtaaccagctgctgcaggcttgccagcttccttcatagcagttgcgataccaacgtttgaagcgtgacttctgtgagcagtaccaaatgcatcatttacaaacatgtcgccaagacttgcccagtattcgccaagcttaggatcgttacctgattcacgcttaccaaagtcgttgtcgatgtcttggaatctagtgttttcaagaacgataacatctccatccttcatgttgttgatagcgtcttcaacttctttaccttcgtttgatggtacaaaagttacaggcttcttaagaagttcacttaaacgttcagcaactggctttaatgataattccttcttgtcagcatctgacttaacacgacctaagtggctaagtaagatagccttgccaccgtgttcaatgatgtacttaatagttggaagtgcagcaacgatacggttgtcgtcaccaataacgccatccttaattggaacgttaaagtctacacgtactaagacctttttgcctttaacatcaagatcgtcaacgattaatttagccattataatcctccgattattttgatattttttcttcaaaaaaaggcggaaggaagaatctccctccgccttctcaattaccacttaactatataatcagttaattaaaattaatgattaaagagttgcaaagtgtaataaagtacgtaccatttggcaagtgaatgagtattcgttgtcgtaccaagcaacagtcttaactaattgcttgtcacctgcagtggttaccatagtttgagttgggtcaaagattgaaccagcagtcatgttaagaacatcgctagaaacaatgtggtcaccgttgtaagcaaatgatgggctttcgtacttcttcatagcttcgttaacttcgtcagcagtaaccttcttgctcaagattgataccaattcagtttctgaaccatctggaactggaacacgttgtgcgtgaccgttcatcttaccgttcaagttaggcaataccaagccgatagccttagctgaaccagtagtatgaggaatgatgttttcagcagcagcacgagcgtcttgttccttaccactacgtgaaggaccatccaaagtcatttgagtaccagtgtatgcgtggatagtagtcatagtagcaacttcgataccgaattccttgtccaaagcgttagccattggtgcaagtgagttagtagtacatgaagcagctgaaacaatcttgtcatcagcagtcaaagtgtcttcgtttactgagtaaacgatagtcttcaagtcgttaccagctggagctgagatcaatacacgcttagcacctgcatcgatgtgagcttgtgacttagccttgctagtgtagaaaccagtacattcaagaacgaagtcaacaccatcgttcttaacccatggaatgttttgtgcttgtggttctgcgtatacgtggtaactcttaccgtcaactacgattgaatcttcagttgatgaaacttcgtggttgaaagtaccatgagtagtgtcgtacttaagcaagtaagcaagcattgctggagtagtcaagtcgttgatagcaacaacttcaatgtcctttgacttttcgccaaggtccataatacgacggaatgctaaacgaccgatacggccgaaaccgttaataccaattttaactgtcataacctaaagtcctccttaagaactataaacaacatttattttaaacgggatttcatttcccctttaaaatcatatttgaggcgccctcatcagtgattagccaggtttgatgaggcgcattaggcatataagctttaattgcttgagcctttcgggcaccacaagcaaaagcaaatatgtggggtattttgtataggttctcgaactgcaatccaacctgggtgatgcggtcaacaaccttgccatgttcatcgaagaaacacccgaaacattcggtgacggctctcttctcacgaagttcagatagcttaattgaattatagcctctgcgctgtgccatttcttgagctaacccaataccatgaatcacagcatcactttgagaaatgtcttgcagaacatctgcgatcgaggactcacgaatcaaagatttgtaagcatcatctgaaacctgctcaggtaaatataatgtcttataagtacctgaagtcttagcagccatttcttggacgattgtattactttgcgtctctacattttcgcccaaagctcctcgacctggaacaaattccaactggcgattgttagctaaatctggtgataaatacttagcagatctagctaacgccgctccacctagaattgtaactattgaatggcctaaaggcaagagtaaattcaaagctgaacttaatttttctcccatctcctcatatactcggtcttggaaatccgcattaccagggacgatcaatgttctttcaatccctaattttttggctaatgctacttccgtttcaccggcattaaagaggcgatcaagcaatggtcctgcatcttttaatgttttctcacccttttcagttaaaaacatcccaaaactttttgtttcaatcaatcctaattgacataagtactcagtctcagttctgatgtttctctctgaaagccctaaatgctgagcaacactccgacgtccaattggcgcatgtagcgaaatctgctcaaggacaagatacctttgtcgaagaatctttaagacgtcgggaacgagcgcttcgagcaaagaaaagtccgaatccatcgttccctcctttccatgggacatctatcgaccacctacgtgtcgttttgtgtcccagaatgcttaaaaatataagagaaacgtacttttcattcaattcatacatttcccaatcgacactgttagtataacaatgtatttttcgtaattcaagaaaaagatacacgattttaaaaaagtcgtaaatcgagtaaaatcatttttatttcattattttttttgatatactaccacttgtgaatcatctgggcccttagtgtaatggatcgcacataagattccggttcttagaatctgggttcgactcccagggggcccatataactacatgttgaagactaccgccatctcggtattcttctttttttataccaaaaaagcattcctcacggaatgcctttttcaatatcacaattatttagtgcttgtagtcatcaactcagcacgttgtgctaactcagtgtacaaagttgagcctgaaacagataaaccttcaatttcacggcgagtgttgaaatgatggctacccttataagtaccatttgctgctacacggaagatgtagtcgttaaaaccaatatagaattgattgtggttgctgtcataagcaaaaccttgaactggtgaaccagttacgaaattactttgagtagcaccgatttcttctggagtccaagtgtcaccatttctagttaacttccagtattcatattggtgacgaccaccattgtggaacaatgcatacatagtgttgtcgccaacaaaggttgcattatggaagtaacgaggatatgcactgctgccgttccaggtcttaacagtccagattttgttaatcttcatatcactctttcttacttgcataatttcttctgaagctgctgaattagcagtcttattgttattagccaaaacataaatgtagcttgaagaagagccaagtgattgaccatgacctagcttaatgtatggtgaaactttaatattgtttgcgtagcttctaaaagtgctccatcccatagtagttaagttttgagcagcatatttactcttaattgcattcaaattgtaagaaacaagatgtcctcttgagtcgctactgctagtgtacatagaagctgtaaaaataccatcattaacagtaataccttcaggaattaccccaacttgtcccattgcatcagcagcttgaccatagcctaagctgacaaaacgtggttggaacaaacgagtgcgcaaagtcatgccgttacctgaatagctatttgagctagtttctgaacgataaccgtgtgcctgattccaatttcttgatgatccctttgagccaccattccaagtatgaactgccttaggaccactcttaacagaagcacctgcactagtaattccttcatttgcatctgaacgaacagttacattaacgcttgcctttgccctgccatatgaataatctaccttagtagtaccggcacggcttgaattaacagagctatgtgaaacattaaccttatccggattaattgcagtaccttgtccatctgttgcatagttaattgcatccctagttggaaaactgtagttgctgttgtgaactaagctaacatcttgagctactgaaatttggtttctagcaaaaaagttttgacttacccaacctacattgcgtccatcgacaataatgtaccagaagttacctttcttggtagaaacatacttcttagattgaatttgaccatgcttaaagtacttggtatttgaaaatgcacctgatggtccttttttagatacattatgataaatagcgtaattaccattgccagcaatcttagtaactgccttgctgtagcttttggcatctaccttgctttgactaatggcaaaaacaccaccaactaatgcagcactggccacaaaagttaataacatctttttcccttttaacatccttattaatcctcccatatgaaaaaatcacgttcattttagcacaaatttatcaaatgaaacatctaattattaaaaaatttcctgaacaacaagactttgaaaacgcttctgttatataattaaaaagttcacataaatatataaatagtaatagggagaaattttatggtcgaatcacaaaataattccaaaaagatgatgtggaccaccctagcaatgatggccttctctaccgtgtggggctttggtaacgttgttaatgggtacgtctactttgacgggacaaaggttgtctttagctggatcgtcatgttccttctctactttgttccttatgccttaatggttggtgaacttggagctaccttcaagaatgctgaaggtggggtttcctcttgggtaaatgccactatgggcgcaaaatgggcctactacgcaggttggacctactgggcttgccacgttgtttatatttccagtaaaggtactggtggtttaagagcgatggcctggggtatcttcggaaatacaaaatggtatgatggcttacctaccgcttggacacaatttgctacattagtagtcttcttgcttttctgttgggttgcaagtcgtggtattccagtattgaaaggcctagcaacaattgctggttcttcaatgtttatcatgtcaatcttattcatcattatgatgtttgccgcaccagctattaatccttctgctggtttccacagtattgactttaactggaagaatttgatgccaaccttcaacgtaaaatactttacttctctttcaatcctagtatttgccgttggtggttgtgaaaagatctccccttatgttaataaggttaaggatccttccaaaaacttccctaaggctatgatggctttagcaatcatggttatggtatctgctattttaggtacttttgccatggcattaatgtttgaccctaaggtggttaatgccaaccttaacgaatacatctctaatggtgcttacatggcatttgacaagctgggcgaatattaccatgttggcggcttgttcatgtacatctattcatggtgtaacgtaatcggtcaattctcaacattagtaatcagtatcgatgcaccacttagaatgcttttgggtagtaaagaagctaaagaatatattccaaagggcttattaaaactcaacaagcatggtgcttacatcaacggtatctggatggttgttgtcctctctggtggcttaattgctattcaagctttagtaccaaatgctcaagctgttatggcacaattagttaaattaaattcaactactatgccacttcgttacctttgggtatttgcggcatatgttgctttaagaaaacagcagcaaaagttcaacactacttatcaaatgactaaacatcaaggcttagcctatactgccggtatttggtgttttgtagttactgctgcatgttgtatcttgggtatttactcaccagatccatttaccttattccttaatatcttgacgccaatcgtcttgattgcattaggtttaatcttgccaggaattaagaaatatcaagaagctaaggcaaaataagatttaaataaagaatgttaaaaaggaagcaatttcaaaagactgcttcctttttagtgtatatttttatttattagcccaagcatttaccaatgccttgtacttggcaacgctaattccttcacctttactgcttcctaaatatgaatcagcatttccataaccagtattgcttacattggcaaagcccattactctataatttctgttaatcaaattcaagtagtgtcctgccattttatagccgttcgtgccctttacggccgcatcataagttgccgtccaagttggactatacttcgccggcttcaacgaatgattcttttttacatcataattccaacttttcttttcagagagccaagtatcaaccggatctaaacccacactttgagtagcgatgttttccaaaccaatcgacttgaaataatgagtatgctttaagccaccacgtttttgatagtcagcatttaacattgaggctgctgtcaaaagtggtgacacctttaatgaccgaaccccttcacttctacgtgctctattgacactattcaaataaggcaatacagctttaatattctttgcactagttgcatcatcatttgaatgcaagtcaacgtattcattgtaccaacttgccttaggctttttacctaagcgacctgttttcaataatttcactgctgatctagcggaactcctttgccctttagtcaaagatttgtttttagatagatatgtcataaaatcaacggcatttttggctgccttaactggcttggaattcaatgcagttaatgacaaggtcaccatcacagcagaagcacctgcaattaaaaatcgtttcttcattctttttctcccatattaatatatgtgaactacgatttaattgtagcacatacactaatggaagattttccttttaaattgcattattattcatctttaccattccgctttttaatctgacgattaattttttgaatatctttttcttgcgtcaatctaatcacaatccaaattatgatatatacaaaaatgaagatacctaaagtttgccaatctataagccaatgattaaaaagcatcataatagaaaacaacgtaaatgtaccaattaaatgtaacaacaacgcaactaaatatgacaggttagtataaaaaagaaaactcaattccccaatcaaaccactacaaatgaaaacaacaattacgctcattaatgggatattaattgcacctacactatttgatactattcctaaaataagcaagcaagtaattgcaccaaatcccattccagttacacaaaaatctaaaactttatgccaaattttcattttataatcccagtttcttttctaatttaggtaaatatcttcttgaaacatcagtcttctgtttaaaagctagttttgcaatcatattgcccgtaaatcctgcctcgagtgcttcaagataattcaaattaataatcccatgttttgatacctgtacaaagtcattatttaatttctctagaacttgatataagcgacctgtagttttaatgacagcacttttggtataaaaagttaattctgttttttcaacctcgactttgataatttcttcaattttaatagttaaaatccgatcttcagtttttaccggcagaattgaatctacctttttaccaaaatcttgaatataagccaataaattttttacttctgctgtttcctctaaagaaattactttgatcttaatttgatcttttttcaaattagaatctgactgaaattctacattcacgtgttaattcttctttctaccaagcatgactgcgagacatattactataactgtcaataagagtgacatagctattattaccaatgcattatccccgttagttaattgatgagacccaaatttaaaatgaatccctaaatactcaatcaatttttgacgcatttcatctggaacatcttcctgacttaatttatttaagagcaagcttctaaaacttgccgcttcataactacttggaaacaattttactatattttgcgcagtttttgataaagttccataaggcatgtaagttgcaaccataaatccagctgctgctccaattaccgccgacaaacgactaaacgttgttgaagaattgataaataaaacgataactaagtttaataaagttgcgccaattgcacctaataacataaaacctaatgctggcaaatatacagtcgattgaatattcaccttatcaaccactgaaaaataaattgccatcaccaaaaaggtaataacctgcatcaagaaacttattattaatgctgaagctacgtaggccatgcattcactaattggagttaaattcgttagcttcatatcatcaattgctcggctttccctatccttcaccatttgaccaagtgcttgaaacgaagtagtaatgcctgcaattgaaacaataccgccaagcatccagaggtccaataattgttttgcatgactaacgttttgccaagaatcaacaagattttgttgtaaaaatccaatataaatcacaaatgaaattagtgcaccaaaacatgacattactacacctggtttattagcaaaataaattttgatatttctcttcattaaggcgaacattattgaagctcctttccagcaatcttgataaatgcatcatcaattgacccttttcgatattcaaatgtatcaatcttatcttcaaacttatgtaaaaggtctatgacctgattactattaagcccatcgatttcaatttgatcatctgacttagaaatttgtttaaaattagtagaaaaagtttgcccttgttttaggcaaattagcagccgactgggtgcatacatctctttaatttcttctgcagagccttctgctaagacattgccattttccaaaatatacatctgatcagcattttcagcttcctctaaatagtgtgttgtcaagaaaatagtcaacccctgttctttttgaagcttttgcaataagtcccagataacaattctcgtttgtaaatctaaccccgtagttggttcatctaaaaataagatatctggatgatcaattaacgctctagcaatatccactcttcttttttgtccaccagacaaagtaccgtatttttgattgaggaaacttctaataccaatcaacccaatcaatttttctaaccactctttagaaaaagttttgtacatccttgcccttaaatatagattctctttgacagtcaatacatcatctaaaacactattctgaaagactactccgatttttagatccttagcatacgtgatagtgccactagttggtttcaataggccaattagtatgttgatagtagtagatttacctgcaccattcgtacctaaataagctaccaactgtccacgattaatcttcaaattgaccttgttcaaggctaacttcttaccatattttttagttagattaaaagtttcaattaacataaaaagacttcctttctgaattcataatcagaatacagaaaagaagcctttttgtacttaaacctcaaataagtggttcatttttacacacaaggtgcaaaatagctaaatcaaaattgcattattcatctatcttaacgtattgtcctttttcatctacaacacctttgaaatggtgcatgctgccatcttcggcctgaaattcacctaagtcaatttccccatagccctttgtagaatcagtaaccttaacatcatcaaaagtttctctgaaaaattgatgaacaattctactcttcaaccgtatatcctttgaatgctcaaaggctgcagacaacgtaaagccctcatctaattgttccttgataaaaacaattagatacaaggtcgctaaattatagcggcgcacaccactttgatcatctgaaatcggcttaatgtagcccttagtttcccaatagcgcaattgcctttgcgaaacaccagtcaatttactaacttcaccgattccaatttctaaattttgaaaaatgtcatgcataatttttttagatttcatcctgataccaccttacagtatagttatattttatatattgttgttatcttttgcaacacttgtgttaatttatctaacttatttgtaagattatttgacaatggcaaattttaagcctatagtttttatagttaacttttataagagaaaggaatattacatgaacaagcaaccaacggatattcatggaaaagcttataatcgaaacctactagttttagttttaattataggttctttctgtactgtattaaacggaacactgctttcaacagcgcttccttcaattatgcgttcatttaacatcagcaccgcaactgctgaatggctttcaacagcctttctgttagttaatggtgttatgatcccaatttctgcatggctaatcaatcgcttcggttcaagaaaaatgtatttgtcagccatgtcaatcttctttattggaacagtgatcgccgcaattgcacccaattttggcaccctgcttgctggaagaatcattcagggattaggcgtcggcgttactatgccacttttacaaacaattatgctttccatcttcccagctaataaacgtggtgcagcaatgggaactgtcgggattgttattggcttagcaccggcaattggaccaacattatctggttggattgttgataacctttcttggcgttatcttttcagcatcattgccccaattgcgggaatagtaattatcttagctttctttttaattaaagatgttttaccaactaagaaagaaaaaattgatgtttggtcagtaacaacctctactctaggcttcggaagtctgttgtatggtttttcagaagctggtaacaaaggctggaccaatcccgagattttaggatttattggatttggaattatatttgtaatcctattcggtatccgccaattgaaaatggatgacccatttttggacattaccgtttttaaacactttgaattttcactggcagctgccttaagtggtatcaccaacttagcgatggtcggcattgaaatggttttaccattatatattcaaaatttgcgtggcgtttctgccttccattcaggtttaatgttactacctggtgcattgatgattggtattatgtcgccaattactggccgtttattcgacaaatatggtgcacgtaaaattgcaattactggtatgactttgttgaccattgggactattccattcgtctttttaactgaacaaagttcatacacgatgattatcattctttacgcaatcagaatggtcggtgtagctttggtaatgatgaatgttactacatctggtatgaattctttaccattaaacaagatttctcacggtactgctgttaacaacactttcagacaggtattaagttcaattggtactgcaattttggtatctgttttaactacaactaccaataataatatgcctggtaaaagtttacttcatgcactgccacttgaatacaagactagagcaatcagtgcaactttagacggttttcatgcttcatttgcaatgagtatcctcttctcattaatcgcattagttcttgcattcttcttaaagaagggcaatcgagcacgtgaacatcaagaaaaggtggatggttaaatgatacttttaattctaatcgtagctgcaattatgtttatttactttaatatcatccctggaaaaaggcatacttctattgcatggctatcattaatcgtaacaattctttgtgttgttggcattgtagaacatgattataatcactggggaatgaaaactgaaacaacttcaagcactaatactctagtttccagtgctactcctcgcctgccaattttgctttatcagcctttaggtaatggaactgaaaaagtttacctttataaaactggtcaacttcaaaagaagccaaaatctattaaattagataaagtatcgacaaaagtaaaacgaagcagccaaccaaaagtaacgattaagactactcgctacacctatagcaatacctttaatcaaataatgtttggcgtctttggtcatgacaaggagttaaaacacagagaatatattttttctattccctccaactggaaagtaatgtcagttaacgatgccaagcagttgcaaaaacaaatgatgaaaaaacagcagtttttaaaacaaaaatcagcccaataaaataatgaagatcaaactttgatcatgatatgaaccccgaaattcggacatgaatttcggggtttttatttatggctaaattatctaaacatgacaaaattgatatttacaatagctagaaaaattaaattcattttaactcaaattttaccatatgatttaagttaacttaaatcacctttacaaacgcttatgaaatataatttaactaaatctaaatgtagaaaattatttttatcatactgcctatttcaattgcatcctatcattaaagtaatttttataagccaaatagccactaatcacggctccaaggccagtggcagaaagcaacataaatgtaatcataatctgatacttaattgcataaatgggatttacaccagcaaaaattaagccggacatcattcctggcaaatttactaatcctacagttttagccgaatctatcgtaggctgcatcgcagtcttaatgctccttcttaaaattggcatcgatgcagttttaatatcactacccaaagccaacttttctaaaacttgttgatgcagatcattaaagctatcattcaacgctttatagcataagccaactgccaccatttcatttccagcaatcatccccgtaatgggaatgacctgcatagggactggtttaattacgccagaaaaaatcagaattcctaatgtcacgtaagtccctaccgcttcggctattatcgaattccaaatattccgccccggattaggatcacgctgattagcattccaagatgcattaaaaattatcacaatagttgaaaccaaagttagccacaaggcattaacatgaaaaataaacttcaaaacgtagccaattacgactaactgaattatcgccctaatcacgctaattaaaatatccttggttagtcctaatttttctttcgcagaaattccaatggaaactaacaccagtgcaaaagctaatactaacgaccagttgctaactacaacatttttcattcgattattccgcctttttttactcttaaaatattacttgcttcatcaatttcactttgatcatgtgtaacttgaataattgtcacgcctttctcagaaacatccttaatcaaattatgtacaatatctttactttgattatcaagcccggtagttacttcatctaagagcaatatctttggtaaaaatattatgtttcgaattaacgcaactctttgcttttcaccacctgataaagcagtaatctttttatctaaaaaatcagcagagagatcaacttgattaagtaaatcagctatttgcttgtcatttacatctacttttctaatttcatacgggaaaatcaaattatctcttactgtttgcccaaataaagacggctgctgaaaacaatatgaaacttctctacgatattgaactggatttaaggagctaatgtttttttcttgatatagaatatcgcctgaattagcactaattaaatttgcaatcaatcgtaaaatcgtactttttcctgcacctgatgggccaattaaggttagaaaatcgcctttattaaccttaaatgatacatcttgcaatatttgttttttatctgcactatattggatatgttttaattctaatattttcattcttttgcctaactaaataacgagactgtaaaatagtttgtgtaaggatgaatgattccttaaatttatttctttaaacattagaaaaaggagttcctttctcgtatgattggtttgaacaaaaaaacacatacagaaagaagaactccttcatgaatgattttaccaaagattttgctcaagctctattcaatccagacaaaataaatgatttattgcgcaaagagctacaacaggctgttaataacttgttagaagctgaattgaccgcctttctgggctatgatccctatgccagaaatggctggaatactggcaactctagaaatggtgcttatttccgcaaagttgatacgcaatttggcccaattgaagtgcaagtgccccgggatcgcaacggtcaatttcatcagcacacgctgcctgactacaagcagcactcggatatcttggaaagcatgattatcaagctttactccaagggcgtgaccaccagggaaatagccgatctaattgaaaagatgtatggcagccattacagtccagctcaggtatcaaatatttccaagcagatgattccaaaggttgaggcttaccacaaacgcaagctaagcgacaagtttttctgcgtctatttggatgcgacataccttcctttgcgccgagaaacatttgagcgtgaagcagtctatattgccattggcatcaagcctaatgggcacaaggaggtcattgactactgcattgcacctagcgagaacattgaagtctggacagatatgcttcaaaacatgaaatcccgaggcttaaagcaagttgagctttttctttctgatggtgttgttggcatgaaaacagccttggccaggacttatcctaaagctcattttcaacgctgtttggttcatgtcatgcgcaatatctgcgctaaagtacgcgtcgacgatcgtgaaaagatcatgaacgaattcaaacaggtgcatcaacagacaaacaaagaagaagccacagctgtcctgcatgacttctataccaaatggggcaaggtttacagccatgttatcagaagcttgaaagacatagaaccagatctgctggtcttttataactatcccaagcagatcagagcttcaatttattcgactaacatgattgaatcatttaacaatgtgatcaagcgcaaagctaagcctaaggcagagtttccaactgaacagtcgcttgatgcttttattggcattcaggcaatgagctacaatgaccgttatttcaatcgaattcataaaggctttggtcaggttcaggacaccttagaatcctactttgattaaataaataattaaaaaatcaatttacgagaaagatctatttacacaaaagatttgacagtttctaaataactcatttttctaattatacaactaaaaaaataaaggaaatccaatattttcattgaatttcctttatttaaattaatatcgataatgattacttagtcaacttttgtttactttcaagtaattcagcacgttgagctaagttcatgtataacttgttgttgtaggttgcgataccttcaatttcacgaccagtgtggtattggtaagtatccttaacttcaccatcagttgcaatcttagcaattacgtcattgaatgcaaggtagaagttattgttcttggcatcataagtaaacccttgagtgtatgtgtttgctacaatgccacccttagttgcacctaccatagttggataccagttatcgcctttgcggttgaattcccagtattcagtttggtctttttctttattataaagagttgtgtaaagcttgtgatcatttacaacaacaccattattgaagtaacgaccgtctgaatcactaccgttccagcatttaatagtccaaatcttgttaatgcacatatcgctcttccgaatttggattaactcttcagacatattgctcttgtatgaaaccttattattgttatttagaacgtaaatgtatttatcagttgagcccattgcttgaccgtgaccaattggaatatatggactaactttaatgttcttaacgtaagaattgaacttcttttggctcatatcaagtaagtattgtccgttaaatgcattggttaaatggttaagattatatcctacaatatgaccattgctaatcagggtactacttaataaactagtgtacaaccagccatttgacatggtaattccttcaggaatatgacctacacggttaatatagtcatcatttttaatgtcacggtaaacacttaataaaactggttggaagaagcgagtagtgaaatctaattttccgctttcactatcataagcatgcttattcttatcaggagtaaaatcagtcttagttacatagttagcagaacttccatagtaagtcttccaggatttcaaatcgccgttaaatggcttagcttggacgctatcagcatcagcaattccttccttagtactctttctgacagttaccttaacagttgcctttgctttaccatagctatatttaacattataggtacctggagttgagcaatcgattgcatcttctgaaatcttaatatctgctgtatcaattacagtacccatataattggttacataacttactgcatcagttggatcaaaatcgtagtgactattttgtactaaactgatagtctttggtacagcgatagcatctcttgtaaagtagttttggttaacataaccaactttacgaccatttacataaatacgccaataagttgcatcctttgtcttaattctctggtcagattgaatatgagcatattgataatcgctagcatcagcaatcttaccactaggtttaccattactaatctttttataaacaggataattcttattgctacctactttaaccattaagtcataagaagtacttgtttgagctggtcccttcttcgcactggaatcagtcttagcagtatctgtattactatcagtagttttagaattatctgcaaatactgcatttgtagaaccaattaacaaaccaacacccagtgctacagctgaagtagcagttaaaattttatttgaatacttcaaacctatcctccgtatcttatattttgcattttacttttatattataatatataaacactgttagctaaaatacatttttattaccattgagcttctttatttgacactttcattacgaagtgatttaattagcactgtacttgaaagagtgctaattaatacgaaatcaattaggaggcaaatttatgctagtacctacagttattgaacaaactgctcgtggtgaacgtgcttatgacatttactcacgcttattaaaagacagaattatcatgcttagcggtgaaattaatgaccaaatggctaactcaatcatcgctcaattactcttccttgatgctcaagacaataccaaggatatttcactttatatcaactcaccaggtggtgtaatcacctccggcttagctatcatggataccatgaactttattaagtcagacgtatcaactattgcaattggtatggcagcttcaatggcttctatccttttgactagtggtaccaagggtaagcgtttcgcacttcctaactcaactgttttaattcaccaaccattaggtggtgctcaaggtcaacaaactgatatccaaattgcagctaacgaaattttgaagagccgtaagaagatcaacgaaattttgcacgaaactaccggtcaacctttggaaaagatccaaaaggatactgaacgtgacaactacttaactgctgaagaagccaaggaatatggtttgattgacgaaatcatggttaataagaagaagtaattaattattaaaaattattcacactctaaaaggagcttgcactcattgtgcaatgtcattaagttaagacattgacaaattgaatctaatctctgtagaaccgaatcattatgatttggttctttttttgcataaaataaaggcgaaaagaacctaccttttcgccctctgattaaattattaaaccttcaaaattattgccagaaagctggtgttaattatgaaagcccttcacagaaatattttagatcgtcttgatcaaattatcaatgatactggaaagcatattcatgattttatcgatgatcctcatgccttcactaggaagcggtttttagatgcagctacagtcattaaaactactattaatatgcaaggaaaagatttgaccagtgagttgtttagagcttttggccaaaaagctattaaaaataacgataaagtagtcagtacttccgcttatgtccaacgcaaaggtcagctttcacccgcatgttttaagcatattctaactgtatttaatcagaatttatttaatatccagttatttgatcataaatatcgtatatttgccattgatgggtctgattttaatcaaatctggaatcctaaatcagagaatatcgttggaaatctcaatcataaaggaaagccatattgccaaattcatgttaatgcactctatgacctgttaaataatacttatcaagactgcatctttcagcctaagtcaaagatggatgaacgtaaagccgccgttcaaatgcttaaaaagctaaattgcggaccatatatagttactatggatcgaggttataccggctttaacatgattgaaaattgtaatcgcctgcctaactgttattatgtcatacgtactaaaacgggatatggcgcatttaaggaagtagctgagttgcctaatcaagagtgtgataaggatatagcttgctgggtgactacctctaattattattatgaaacccataaggctacagaaaacgttcatttggttaaccatcattaccgtcaatatataaaatatcggtctaaaaataccaaagatggcagctgggactttggagagttatgtacaataaaatttcgtgcctgtaaatttagaattaatgatcctaaatcaggcaaagaagaatgggaagttgttctaactaatctaaatagagccgattatcccttaaaaaggatcaaagaaatctaccatttgcgctggggcattgaaacttcattcaaaaagttgaaatatgctttaggtagcgtacagtttcattccaagcaggatagatttattgaaatggagatctatgcccacatgattatgtttaacgcagtcagtcaaattgatgctcaagcatatgtaccacaaaaaaaatgcaagtatcaatatgcgatcaatttcaaacagtcatgttttgtcatccaggctatgtatataatttcttcttcaactgaaatctttaaaaagattcttattcaaattagtcattacacaattccgatcagaccaggacgaaaagacaaaagaaatctcaaacccaaatcagctgtatattatttatatcgtgtagcctaatttctaaacaagatttgggtttatttggcatgaaaaaagagcattcaaatgcgataaatcgcaaatgaatgatcttaaaagtccaagtcgataatttgtcaatgtcttaacttaatgacattgactcattgtgcaggctcctttttcttattctcttaaactctcagctaactcatgtagtttcttaaatcggtgattaactcctgacttcgaaatcggaccatccggaatttgattagctacttcctttaaagttaattctggatgcgccaatctaaaacgcgctaaaacttgcaatttctctggtagatcatctaagccgttttcttgttcaatcagctggatgtcttctacctgcttagctgaagctgaggctgtttttttcatattcgcggtatcacaattaaccaagcgattaaccgaatttcgcatatctcgcataatacgcaaatcttcaaagttaagcattgcattaagtgcacccactatatgcaaaaagtcgccaatttttgcggcttcttttaaataaacaatatagcctcttctacgtttagttgctttagcatttaaataaaaataattattcatcaacttacataaatcctcattatggtcctcataagttgaataaatctccaagtgataacgactcgtttctggattattgacactacctccggctagaaatgcaccgcgtaaataggacattgctccttcacgtgaagtcataattctctgcggaattcgcgttaccaaacctttttcaggatcccagatttgtaagttttctaggatttcttgtaccttctgattcaatcgtaccaaatattgattattttttttcaatttcatcttgcgcgagacaatcagcaatggctcaataccataagcaatcttaatcagcttaaaaattcgtcgagcaatcgcaggattttctgtagtgatatctaggctaaattgatgatcgtgcaagtttaatacaccattcattcgcaaaaaagcagctaactctgctttggcatgctctggatgcacctcaagcgaagttagctcctttttgacttcactagcataactagccatcattttccttcattcttttacgtgacattgattcaaatgccagattaataatttcttttcctaccttttcaccatcatgaaataccaatccatgacgttgatcgataaagtcatcagtaatgacacggcagttttgctttcttaagccttcaaagtcattcttaacaggctcaagataagcatcataatcttctgggtgaaatttgctcatatcaattttggcaccattaaccagagcggtattgatataatttccacctaagtgatcgttaattacctgtacgtgttccgcatcactaaagtgatctgtctcaccacgctgagtcatgatattgcaaatataaataacctcggcgtcagtctcacgcactgcttcacctaaattagagatcatcaagttaggtaaaattgaagtaaataaactacctggcccaagtacgactgcatcagcttgcataatcgaagccagtactggtaaaacagctctaggctcttcatccgaatcagtatcggtcacccagacacgcttaatccgcttatctttagatgtgatttcagtttcaccagactccgtagttccatccacgaattctgcgtttaaagtcaatggttcattggaagctggaaaaacatgaccatcaattttcatcatttttgacaaagattgaactgcatcaaagatattgccatgcatttcattcaatgccgcaataattaaattaccgattgcatgtcctgaaaaaaaggaatcggatgaatcaaatcgatactgaaaaatattcttttcttcctgaggtaagtcactaagtgataccaaaacattacggatatcaccaggtggaactacgttaataaagttacggattgaaccagatgaaccgccgtcatctgaaaccgttacaattgcagtaatttccgcgttttgatcttttaaggcattcaaaataactggtaaacccgtaccgccaccaattacgactacacggggacgtctgcctttaatcacgcgaacaatccttgtttctccatatggcacaggtgcgcacctactttctaatataacgactcacttcacggtgagtaatatcgactggatattttttagctaaatctcgtgccaactgttgggcaattgaaacactccggtgttgacccccagtacaaccaattgcaatggtcaacttttccttcccctctttgatatatccagggatagctgtttcaagcaaatcaagcaattttttataaaagacctgtgtttcttctttgttcatcacatagtcaaatacacgcttgtccagtcccgtaaatggtcttaattctgaaatataaaatgggttaggcaaaaaacgcacatccattacaatatctgcatcaattggcatcccatacttaaagccaaatgacatcacttcaattgaaaatggctgccgcttgcgatcactaaatgtattgattaatttttgctttaattccttagtcgacaagtttgacgtatcgataatataatttgatctatttttaattggcattaaaatacgacgttcttcttgaatgccatcaagcaagcgacctttgccattattggctaaaggcggaagacgccttgtttctttataacgagcaaccaagacatcatcggaagcatccaaaaataggatagtagcttgcacattgccattatcttcaagtgaattaacttcatccaataaatcgcgataaaatgtcttaactcgtaaatcaattactacggctaccttatgaaagtcattggaattattaattaaatcccaaaaactacctaataaagttggaggaagattatcgactacaaagtagcccatatcttctaagtcatgagcgaccacagttttacctgctccgctcatgcctgtgactattaataattgttttttctcatcagccatgttaaaatcctcctctttacaaattatatcataccgggtgtgtcataattgtgcaaaaaaaagaagcctttcggcttaaatttttatcaaatattaacggtgcataaatgcaaccacaatttcattaatgccaaagactaataaccagaatgcaactaaccatactaagcttaaggctgcgattactggattaataattaagaagaaggcaataatcaaacttaaaatattcaaaatcaagttaaatacaaagtatccggttgaaaatgcacgtaagtgccatgaccaagcaatacctacaactgaatcaacaaagaaccagattgcaaataagtaagcgatagtcaaaccaccaatatcatatgagcaaatgaacaagataccgataatgatatctaatacacctgacacaattgctacccaactacgtgagaaaaattcacgaaagcgtgagtaagcagccaaccatacaataccttgaacgattgatacaatagcaaaaatcaagacaaatgcatgcaaccctttagctgggtgacgtaataacacgaacgcaactacgaccattaagataccggcaataaatgcgccccagtcaaagccgcgattatctctagaactagaaaaaatatccatttttattcctccttgcagactattttacacttattcaaggttaataaaaactattggctattgtcttctagcctatttttttgcttcttttgttagtttagtatcgcgttctaagactggtttcaaatactgaccagtatagctttctttaactttcgctacttcttctggcgtaccggtagccacaatttgaccgccacgttcccctccttcaggacctaagtcaatcagccaatctgcatttttaattacatcaagattatgctcaataattaaaaccgtattgccttcatctaccaaccgctgcaaaacttctaataaacgcttgatatcatcggtatgcaaaccggtagttggttcatcaagaatatagaaatttttaccagtagaaagtttttgcaattcagcagctaatttcattctttgagcttcaccaccagataaagttgtagcggattgacctaatttcacatagcccaaacctacatcaacgatagtctggagtttacgctgaatcttaggaatattttcgaaaaacttagttgcttcattaatcgtcatatcaagcacttgagcaatattctttccccgataagttacttccaatgtttcagaattataacgagtgccgggacaaacctcacatggtacatacacatcaggcaaaaagttcatttcaatcttgataattccatcaccatgacaggcttcacaccgtccacctttgacgttgaacgaaaatcttgctttagtataaccacgcaattttgcttcattagtttgagcaaataaggttctgatatcatcaaaaacactagtataagttgcaggattactacgtggtgttctaccaatagggctttgatcgatatcgataattttttcaatattcttgtaacccttgattgacttatatttgcctggcttagttgaattattgtttaatttttgggctaaagcgcgtttcaagatcatattaaccaaagtagatttaccagaacctgagacaccactgaccacaataaatttgcccaacggaaaatcaacattaatattctttaaattattttcttgagctccagtaattgtaatctttttaccattgcctttacgacgcttcaatggaaccggcacaaattttttaccagacaaatattgccccgttaaagaatcaggattctgctctacttctttagtagttccttgtgccataactttaccaccgtaaacaccggcaccaggtcccatatcaaccaaatagtcagcttgccgcattgtttcgtcatcgtgctctaccacaattaaagaattgcctaaatcacgcattctctttaaagaagcaatcagccgatcattatcacgttgatgcaaaccaatagatggttcatccaaaacatacataactcccgataagtttgagccaatttgagttgccaaccgaatacgctgagcttcaccaccagacaaggtattagctgatcgagaaagagttaaataatctaatcctacactatccaagaatgaaagacgatcgcgtacttcctttaaaatcggcttagcaatcatagtctcttgctcgcttaatctgacgtccttaaagaaatcaagtgctttatcaatagaaagctccgaagcttccgcgatatccttgcccatgactttcactgctaatgctttttcattcaaacgcttgccgtgacaagttgaacaagtaagttcagtcatatatttgcccatcacatcacgcataaacttggacattggtcgtttataacgccgctcaacattggccattactccttcaaatggttgaacggtatcattaacgccaaagtcaccagttacatggaatttcaccggcttagttgagccatgcagaataatgtcgcgttgacgtttagttagtttattaaaaggcttatccatcggaatttttaatgccgtgcaagcttgttccaacatttcagtatagtaattggaagtcttccatggagccagtgcaccttcagctaaagattttgttttgtccggaacaaccaaatcttcgtctactgctaacttcatccctaacccatcacaatcagggcaggcaccaaatggtgcattaaaggagaacagtcttggttccatttcacccacagtaaagccacactttggacaagcataatactcagaaaagttaagcatttcaccgccaattacatcaacattcatgtagccatctgacaaacgaagtgcagcttcaacagaatcaaataagcgagacttaatgctatccttaacaatcaaacggtcaacgacaatatcgattgagtggcgcttgttcttagctaattcaaaatcctcaccaatttcgtgcatctcaccatcaacaattacacgaacatatcctgcacgttgtactcgcttaaatacttccttgtgttctccacgcttagcacgaataactggcgctaaaatttgaattttcgttctttctggtaaagccatcactcggtcaaccatctgatcaactgattgtcgttgaatcagcgtcccatcattaggacaaattggatggcctactctggcccaaagcaaacgtaaataatcattaatctcagtgacggtcccaactgttgaccgtggattatgtgacgttgttttttgatcaattgaaattgctggatttaaaccatcaattgaatccacatctggtttatccatttgccccaaaaactgtctagcataactagaaagtgattgcacataacgtctacgcccttctgcataaagcgtatcaaaggctaaagaacttttacctgaaccagataagccagtaataactactaacttatccttaggaatagttaaattaatgtcttttaaattatgttcacgtgctccgcgaataacgatcttatcatttgccattaaaattctttccttttcttgtcttcggttttcttgatgatttttgcaattccataattgcatcccgcaagttagcagcttcttcaaagtcaagcttcttagctgcttcttgcatttgctcttgcaagttgctaatcattgtcttcttttgcttagccgtcaattcatcaaaattaagatctgcaaaactatcagatttttcttctttttcactcgacggtttagtaatcgaaattacgtcttgaatcggcttaatgattgtcttaggcgttatgccatgctctttgttaaattccatctgaattttacgccgacgcttggtagctttaatcgctgctctcatggaatcagtaatcgtatcagcatacattattacttcaccattggcattacgggcggcccgtcccatagtctgaaccagcggccgatatgctctcaagaagccttccttatctgcatccagaattgctaccagtgaaacttccggtacatcgattccttcccgcaacaggttaattccaattaagacatcgaacttacctaaccgtaaatcacgcaaaatttgcattctttccagcgtcttaatatcagagtgcaaataacgtactttaattcctaagtccttcaaataatcggttaagtcttccgccatttttttggtcaaagtagtaacaaagactcgttcatgacggtcaatccgtttattaatttcgccaactaaatcatcaatttgaccctcaattggccttacttcaatcttgggatcaagcaatccggttggtcgaataatttgttcaaccttatgatctgttcgttcaagttcataatcacctggggtagctgagacatacaaaatttgattaacatgcttttcaaattcggatagctttaatggacggttatcaagtgcagatggcaaacggaaaccatagtcaatcaaggtttgcttacgattacggtcaccattgtacattgctctaatttcaggcatagtagcatgtgattcgtcaattaaaattaagaaatcatctgggaagaagtccaacaaagtatacggtggctctcctgcttttcgtccttccatatgccttgaatagttttcgattccgttggtatagccaacttcacccatcatttccatatcataggtagtacgttgcttgattctttcagcttcaagcaatttgccttcgccttcgaactttttaacctgcaatttcatctctttagaaattgctcccaaagctcgccgcaattgctcgtcattggtcataaagtgcgtagctgggaaaagcgaaatactctcacgctcaccgatcacctcaccggttaacgaatcaacttcaacaatgcgatcaatttcatcaccaaagaattcaattcgataagcatgattagaattgccggctggaaagacctcaactacatccccgcggacccgaaaacgaccgcgttgaaagtcaatatcattacgatcatattgaatatttaccaaatcacgtaacaaggtattacggtcatattcttcgccttcatggatcatcaagacactgcgcgcatactctttaggatcacccaaaccatagatacaagaaaccgaagcaacaactactacgtcattacgctccattaaagctgaggtagtagcatgccgcaactgatcaatttcatcattgattgccgaatccttttcaatataagtgtctgattgtggaacgtaagcttctggctgataataatcatagtatgaaacaaaatattcaactgcattattaggaaagaaacttttaaactcaccatatagctgccctaccaaggtcttattatgcgtaataactaatgtaggcttattcagcttagcaataatattggccatggtgaaagttttcccagtaccagttgcaccttccagaatctgttctttatatccttttttaaatccagcagtcagtttatcaatagcttgctcttgatcaccggctggtttaaactttgatactaattcaaatttgcgatttttttgtcgtttaatcataaaaaactcctcaagaaaaaagttggacaagcatagtccaactttttaattagtatctatattttactaccgcgaacgtgctttcgcacgaaaaatgcttaattatttaagtaaatctgctaaagccttttgataatcttcagctgccttttctgcagtggcaatgtcttttttgtttacaccaacataggccttaattactggttcagtacctgatgggcgaagtgctacccaggtttcatcatctaagaagtacttcaacacattagattctgggaacccttctaatggtgtcttcttgccattttcaatagtttctttttgcaagaaatcttgaatcttaagcactttactaccgccgatttcggttaagtgctcattacgcaacttgctcattaattcggccatcttcttttgaccaccaatacctggcatttcaattgcacgggtaatttcataagcaacgccatacttttgccaaatttcttgcaaaccatcaaagacagtcatcccacgtgaagcatagtatgaagcaacttcggcaaacatcaatgcaccctgcatagcatccttatcacgagcaaatggtttaaacaaatagccatagctttcttcaaagcccatcaagaacttagcatcaccagctttattcatccggtcaacttcttcaccaatgtacttaaagcccgtcaaaacatgcttagtcttaataccaaagtcctctgcaatcttaaatggcaaagcactagaaacaactgaagtaacgatctcataatcaggggttaattgaccattttccttcatatgagccaataggtagtaagccatcaaagtagcaatttggttaccagtcaaaacttggaaatcaccatcagtttttctaactgctgcacccattctatcagcatccgggtcagtagcaataatgacattagcatttaccttatttgccaacttaaaaccaggttcaaaaacatcacggtattctggattaggcttaattgtggttggaaattctggatcaatgattgattgacttggcacaggaatcacattatcaaagccgccttgtctgaaagcacgatcataaagcatcttgcctgtaccatgaagtggagtataaatgatctttaacttgtcagcgttggccttaaccatctctggatcaacagttacttgcttcaattcattcaagtaatcttcatcaacatcttcacctattaactgcaaaatgccattagcacgcaattcttttactggtgcagccttgacagcaaaaatatcagttactttttgagcataagcaaaaagtcgatctgcattatctggtgccatttgtgcaccatcttcaccgtaaactttatagccattgtattgcttagcattgtgtgaagcagtgatattaattccagcgaaagtatgcaaatgacgtactgcatatgaaagttctggtgtcggtcttaaatcatcaaataagtaaacatgaattccgtgtgcacctaaaactctggcagcatgttctgcaaactctcttgagtgatatcttgaatcaaaggaaatagctaccccacgctttttagcatcagcaccattttcttcaattaaacgagctaaaccttcagttactcgacctacagtaaacaagttaatccggttggtaccgggttcaagacgaccacgcatccccgcagtaccaaaattaatatcctgtccaaaggcatcttcgatccatttttcatccttgcccaaagtatttaattgatcttttaaataatctggtaaattagtagctttttgccattctgtataaatttctttagcgtccatcaatgtcctctattcattaaaaatcggatttctaaagcgctttcaaattattaacaattttctattatctgctattaattataaaacttattagtcattaatttaagctttagacaaaaaaagacatgtccaatacgaacatgtcttaatgaaaaaacgaataaatttaatttttcttgtcttgtaagtcttggtagtaattatatgcagcttgaccagctacactaccttcaccaactgcattagcaatttggcgtaaatctttttgacgaacatcacctaaagcaaagataccaggcaccttagtttccatatgatcatcagttacaatccaaccatggtcatccaagataccaagatccttaaaaggttcagtttgtggtaaaacacccacgtaaataaagacaccagcaactggaatttctttttcggcaccagtttccttatcgcggtacttaacccctgtgactttcatgtcatcgcctaagatttcttcagtttgtgcattccaaatgaaatgcatcttcttgtttgcaaatgcacgcttttgcaaagttggttgtgctcgcaattgatcacggcggtgaataactgtaacgctcttagctaattgtgaaagataaattccttcttcaattgctgaatcaccaccaccgatgacagctacatcttcatctttaaagaaagcggcatcgcagacggcacaatatgaaacacctttgcctgaatattcttcttctccaagcacattcaaatgcttatgatctgaacctgtagcaataattacgatcggtgcacgatactcattgccatcatcagttttaactaacttatcctcgccatcgagttcaacactttgtacgttgccatacttataatctggttcaaacttcatcattgtgtcgtacatcttttgactaagttctggacctttgatttcagaaaaaccaggataattgtcgatagcatcagtattgttcatttgaccgccatagggaccgcgatcaagaacaagaatctttaagttagcacgcgcagcatataagccagcagtcattccaccaggacctgcaccaataataattacgtcgtatttatcagccataatctatccttctttctacttacttttgataagcaaataatacaatagatttaacttcttgccaactattttgcttatcttttataaacgaatttcaggctttggttctctacccatcattttcttaatttctgtatcaacatcagcatcttcataaagaacacggtagattgcctctgaaattggcatatcaatgcccttttcttcacataattcgtgaacagctttaacagtagtagcgccttcgacaacttgtcccatatttttcaaaacataatctaaagtcttgccttcgccgatttgtttaccagcacgccaattacgtgagtttactgaagtacaagttacaattaagtcaccaatacctgacaagcctgagaaggtcattggcttagcaccaaagtattgcacacccaaacgagtgatttctgctaaacctctagtcatcaaagcagctttggcgtcatcaccatatccttggcctactaaaatacctgcagcaatcgcaattacgttcttaacggcaccaccaacttctacacctactaaatcatcgttagtgtagaaacgaacgtagtcattggagaacaattcttgtacccgcttagcattttcttcattagttgatgcacatgcaatcgcggttaaatctttttgagcaacattttctgcgtgactaggacctgaaattgcaacaatcttatcttcatcatctggataaatttcttcagttaaaatttcagaaataagcttcttactgcctggttcaatccctttagttgcagtaactaacagtggcttagcacccgtcttatctaaaaccttgcgtacgtttttagcaacgattctaactgccttagttggcaaaacaaataaaacaagttctgccccatcaagagctgcttccaaatcaccagtagccttggtattctcatttaatttccaatccttcatatagtggctattggtgtggtgagcgttaatttcttcattaacactatcaatgttaccgtaaagagttacatcgttaccattatcggctaacattgaacccaatactgaaccccatgaaccattacctaaaactgcaatctttgtcattttttctctcaaactttctaattaaaatcttttattaattctaatctcttgaatacgggtattttaatccactaccatccaaataccattttggattaacgactttccgccgataaatccataaaataattgtagcaataaagaggattaaacttaatgcctgtgatactcgtattataccaaaaatatacagactatctgtcctcattccttcaacgaagaaccttactacactataccaaagaagataggtcatgaaaacttctccctgcttgaagagatgttttttatgacgcaaggatagaattaagattaagccaatcaaattaaaaaatgattcgtacaaaaaagttggttgataatacgtcccgcctattttcatttgctcaataataaattgtggtaagtgtaagctttgtaaaaaatgaagagtagttggtgcgccgtgcgcctcttgattaacaaaattaccccagcgtcccaaaatctgagctgccatgactccaggagcaatgatatccagcattaaaaatggaggtagcattcgtttataacagaaaatcaacagcacaattaagccggcaattaaaccaccataaatcgcaatcccaccattccaaatcgcaataatttgctcgggatgctgtgaataataaccccattcaaaaatcacataataaatacgtgcgccaacataccctaacggtactgcccacaatagcaaatcgacaaaatcatctggaataatttgacgtttttttccttcgttaatcgccatccagcaagctaacataatggctactgccataatgatgccataccatttgacacttaaattccctaaatgaaaggccaccggattaattactaaattagtcattatgcggcaccttattcgtatcttcttttgagtgctctgaaatcagactagtcaaattattatcaaaagtttgagttgcatcatagcccatcttcttagctctgaagttcatcgctgcaacttcaataataatttcaatattgcgtccaaccttaactggaatattaacctgtggaattggtacattgcagatttcacgcgtattttcttgaaaacctaggcgatcataattagcttttggatcccaattaaccaaattaattaccagttggatttctgttctattttttacggcaccggcaccaaataaattcatcacatcaataatgccaattcctctgatctccattaagtgctttaagatctttggtgcttcacccacaacggtattatggtctttttgaaaagcatctactcgatcatccgcaattaatctgtgtcctctttgaactaatcccaaagcagtttcagacttaccaacaccagatgcaccagttaacagcacacccatccctttgatttcaaccaaaacaccatgaatgctggttcttttggctaaacgagcacgcaagtattcagttaaaatactggatatgtaggtagttgactctcttgtacgcaaaattgggattttgtgttcctctgctgccgtagttaattcttccggtacaggcaaagagcgagaaatcaaaaaacacggtgtagccttagtacacattttgttaaagacatgcattctaatatcatggtccaagcgtgccgcatatgaaatttctgtccgacccaataattgaattcgttgcgcaggataaaaatcaaaataaccagttaattctaatccagggcgataaatatcagaaacataaatttcttcatctttgatatattcctgtccttggtaaacttcaaggatactctgattgtcctggatcaatttgcttaatctaacttcatcagccatattaggcctcctaactatttatcaatatctttagtggtgacatttctagctttttttcttggtctaggaccagaagtactagtagccttaaaccactcacgataacttccactacttggcatattatcttgatttttccttccagtaaaccgataaataagccaaatgattaaaatcgcaattacagctactggtaaaagtaaaataaatgccttaaatagaacaaacaataaacttaaaataattagcgctactaaaacaagcgttacaatttccattaaactcattttttaacctaatctggattctcttgactaagcaaccactgtaaataggaataaataaacggttgcaattttccgtccattactccttgagcgtcagctgtttcatgacctgtccgcaaatctttcactaggttgtaaggatggaaaacatatgacctaatttgtgatccccagccaatctccttttgatcgcctttcagagcctgcttttgcttacgctttttttcttcttctaagtgaaaaagctttgctcttaattcattcatcgcagtttcacggttttgcaattgtgaacgctgtgcctgagacgtagtcacaattcctgttggtaagtgcgtaattctaacggcactagaagttttattaatatgctgcccaccagcaccactagagcggtaaacatcaacccgtaaatccttaggatcaatatcaatttgaatactgtcatcaacttctggaatcacttctacagaagcaaatgatgtatgccgtcttttagccgcatcaaatggcgaaattctaaccaaacgatggacaccattttctgatttaagcattccgtaagcatttttacctacaattcgcgcactaacgctcttcaacccagcttcttcaccaggctcataatcgttgatttcaaatttaaaaccagctgtatcacaataacgttgatacattcttagaagcatctgtccccagtccatcgcttctgtaccgccagcaccagggtgaatttccatcaaagcattatggctatcatacttacccgacaagagcaggtctaactcataattatgaaaatcttcttgcagcgtagctagatccgcttcaacttctttttgcaagtcaggatctggttcttcacgcaaaagttcaaccgcagtagtttcgtcttcgtagctagtttgcaattttaaaaatgaatcacgtttttcctttaatcggttggtttcactaattaatttttgcgctttttcctggttattccaaaaatcaggctgcgccatcttgttttcattaatttcgatgctttcatcaatcgcatctaagtcaaagagaccccctaaagtgatttagacgtttttttagttcatctaacacactttgaatttcactaatttccatttttacctaccatcttttattttattgcaaaaaaagggaagctcttaactcccctttttctttattaacgactaagattttgtctaatttcagccttcatgaacaaacgagttacatcaaattcaatatttgaaatcatttcttcaaacattctgtaaccagaatcttgatattcaactaatgggttcaattgaccgtatccacgaagaccaattgattgacgcaactgatccattgcatcaatatgatcagtccaacgatcatcaaccacacgcaagataactaccttttcaaattcaagcatttggctaggatcgcctaaggccttttccttatcttcgaagttttgctcaacaatgtcataaagcttcttcttcaaatcttcaacactaatagtcttgaagtcaattgagtcagttaccttgtctgaagtcaaacttgaggaaatgaaatcgcgtaatgagtcaagacgccattccttgcgttcaccttgagtaaacattgctacttggtgatcaattgttctgtgaatcattggaattaaaacattcttcaatgacttatcagcttcaatgacctgcattctttcgccgtagataatttcacgttgaatacgcataacatcatcgtattgcaaagtttgcttacgagtatcatagttattaccttcaacacgtttttgagcagattcaacttggcgagtaatcaagcgactttcgataaccttatcatcatcattatctgataaacgatccaagaagtccttaactcgatcaccaccaaaacgcttcatcaaatcatcttcaagcgacaagtagaatctggtgtaacctgggtcaccctgacgaccagaacgaccacgaagctggttatcaatacgacgtgattcgtgacgttcagtaccaataactgccagtccaccaagttccttaacaccaggcccaagcttaatatcagtaccacgaccggccatgttagtagcgatagttacggcaccacgttgaccagcgttcatgatgatttgagcttccttagcgtggttcttagcgttcaaaactgcgtgaggaatacctgctttatcaagcatcttactcaaacgttctgaactttcaatggcaacagtaccaaccaaaacaggttgaccattagcgtgacgcttcttaatttcttcaactacagcgtggaacttagagtccaaagttggatacaaaatgtctggcatgtcttttctggcaattggacggttagtaggaatcgtgattacctgcatgttgtaaatttcacggaattcttcctcttcagtcttagcagtaccagtcatacctgacaacttcttgtacattctgaagaagttctggtaggtaatagtagcttgcgttcttgattcttcttgaatcttaacgccttccttagcttcaatagcttggtgcaagccatctgagtaacgacggccttccattacacgaccagtgaatgagtcaacgatcaaaacttcgccatcttgaacaacgtagtcgatatccttaagcatgatgtagttggcacgaagagcttggtcaatgtggtgaaccaacttttggttttcaacatcgtacaagttctttaggccaaagtgttgacaagccttttcaataccagttctggtaagtgaaatagtcttagttggccagtcaatcttgtaatcgccgtgatcttcatcatcgtcggcatcatcatcgctcttgtcttcagtcaaagtcttaacaaagcggtcagcacggatgtaatcactgtttgcttgttcagcttcaccagaaataatcaaaggagttctagcttcatcgattaagatagagtcaacttcgtcgatgatagcgtagttcaatggacgttgtaccatttgttccttgtaaacaaccatgttgtcacgcaaatagtcaaagccaagttctgagttagttgagtaagtaacatcacagttgtaagctgcacgcttttcgtctggtgacattgagttcaagttcaaaccaacagttaagccaagccacttgtaaagttgacccatttcttcttcgtcacgacttgaaaggtattcgttaacagtaacaacgtgtacacccttgccttcaagtgcgttcaagtatactggcatggttgctgtcaaagtcttaccttcaccagtcatcatttcggcgatgttaccgtagtgaagtgcaataccacccaaaatttgtacgtggaatgggtaaagtcctaatacacgcttagcaccttcacgagcaactgcgaatgcttctggtaaaagatcatccaaactttcgcccttctttaaacggtcacgaaattctggtgtctttgcttgcaattgttcatcagatagcttgctcatttcatctgcatgagcttccaccttatctgctattttttcaaactttttaagttctcgtttatcatcgttatatagtttctttaaaatatttgccattaaatcggtccttatatgtcgtaaagtctaaaaatacagattaattttaacatgattgctatcaaaagaaaaatatctcacacaaaaaaccccacgcaaaactcacgcgaggttccaatgtgtaaaagtattttaactcaattattcgttagtttcaatcaaaccgtaacgaccatcgtttctacggtaaacaacgctagtgccgttagtttctgcatcttcaaaaacgaagaagtcatgttccaacatgtccatttgtaaaatagcttcttctggatccattggctttaagcttacacgcttgttacgaacaatatcaaattcgctaggcttcttttcttcttcttcaggttgttctacaaagaaatcttgtaatcccttttcacgactctttctatttacacgagtcttgtactttctaatttgacgttcgagtttttcagaaacgaagtcaatgctacgatacatatcatccgtggtttcttcggctctcaaaactaagtatggtaaaggaatagtaacttcaactttagctgagtgatcacggtatactctcaagtttacgtgtgcaatcacatcttgattcaattcgaagtacttctctaacttgtttaaccgcttttctacataacttctcaaagcatcagttacttcaatattttctccacgaacattgtactttaacatataagattctcctttcaccgctatgcggtttttctttacaaatttattataccaaaaaatgtaagcgtttcataacaaatctaatgacaaattgaaaagctttcaattttcatttcgggaaaaccctgctgtaaacggtcccgcgcgtgatatagcgtgcgcccggtcgtgtaaatatcatccaaaattaatacttttcctgaaactatattttccttgattttaatatttttatcaatcaaaaagctttgaggcgttttaagccgctcctctttgtttttctcaccttgggcatgactacccgattgtttaatcagaagcggtgtcagcggcaaaatatcagcataaatagcaaaaattgtatcaaactgtcgtcttgattgatgttcaggtgaagtgggcacgggcacataaaagtcatagttagttttacacaaatagtcataacacaaatcttgcaatacttcccgcaaaacataatctccacgccgcttatacgcaaccatcaagtcatgaaaagcagaattataacgatataaagcatgattatgcagaatatttttgccataaatggcttgccagtttcgacaatcgctacacataaagccttgacttagttccttatcacagccagagcagcgattgtctgctagcttttcaaattgttttaaacactgtaaacaaatcttattttttcgcgctggtttaaaagaaaaaagctgtgcaaattgtaccggtgatgtaaactcctgctcacataataaacaagttctcatctattcatccccttgatctgcttaatactctgtcgaatattcttggtataacgatgataacaatacaaaactaagcccgtttggtcatcgtgagcccgaccaactcgacctgcaatttgcaccaaactagcagcagtataaattgcatcatctgctgcaataataattacccaaacatttttaaaagttacaccacgctctaaaattgtggttgtcaacaataaatcatatttacgatcacgaaaaacctgtactttttctaaccgttgcggatcttgtgcatgaacaccggccaatttaattttgttttgcaactttttccgcaaagcttcttgataaagcggaatttcttcaatccgtggtacaaacaaaagcaaaggatgaccactttgaatgacttttttaatctcctgcattaatttaggatgaatttgtcccttccgcaaaaacggcctgataaaaagcctttctcttggtacaggcaataatccaccatgaaaacgccgatttaagcgcaaaatttctaacttccctgttttagcttccaaaagcaaatcgttcgttggcgttgcggttaaatacattcgagtcccagttgttttaaccgcattttcggccgcaaaatgtagttgcggattacctacataaggaaaagagtctacctcatcaattaccaataaatcaaaggcacgataaaacttcatcaattggtgtgtagtacaaattgtcaactgctctagccctatttccttaaattcacggccatgatacttaccgatctcaacttgggcaaacgctgccgaaaatcttggaaacagctcatttaccacatcaattcttggtgtagcaatacaagcgcgctgtccttttttcatacatcgagcaatcaactgaaacaacatctcagttttacccgccccagttacagcatgaaccaatgtattttttctttgttcaaaattttgtactaatttatccgaaatattctgctgcaatggggttagtttaccttgccagcttaatcccccgtttttaacatgagaaaaagtattattactgtcttttctaataagccaatcgccctcatttgcacgtcccaagccaatacacccacgacaataatatttaccattaggcagtcgactattaacttggctgccacagcgattgcatttacctttttcaattactgggattttgcggcatccctcaaatgtgctagaatcctcttgactaacaatccattgacgacctgataatagagtcaaatcttccatatttttacctccctattatctattacgcaaaaagaggcgattattttgtcagaaaaggaaaattttttaactattaaagaaaacggcaccggtgaattaattatcaaaaagagcagattcattgccaatattgcccgcaccactactactgatgcggcaaatgattttattcaaaaaatctctaaaaaatatcgcgatgcttcgcacaatacctttgcctacacgatcggcttaaataacgaccaggtcaaagaaagcgataatggcgagccatcaggtacggctggtgttcctgaattaaaagcattgcaattaatgaatttaaaaaacgttacagtcgtagtaacccgttattttggtggaatcaaattaggagcaggcggtttaattcgcgcctattccaatagtgtcaccaatattgttgaaaaagtcggcgtcattaaacgcgttttacaacaagaattaatttttagcgtaccctataaccgcttcgatgaagttgatcattacctaaaacagcaaaaaatttttattgccaataccgaatacggtgtggatgttaaaattcatatttttgttaacgatgaccaacaagctaaacctaaggaagacctaactaatttattggccggacaggttacctttactaatggtgaaaaacgctataatgaaattcctgttgaagctaataattatcatgaacaataaaaagagcatttggatatttccaaatgcttttttgctacttattattttttttactcttcaattgatctggtttttcgtctcctaagtgccaaacttcaattgttggatcagttttactcttttgattaataattttctgaattacatgcatcaaaggatggtatttttcacccaataaaccaattgattccacaaaatactctaaggcaatcagcaagcctaagatcagaagccaagtgccccaagttggcgaaagcaggaataataaagaaataaatgagaaaaccaatgataatgcataaatagtcaataccgtctgtcggtgcgttaaccccattcgcatcagctggtgatgtaaatgatgcttgtctgcttctgaaattggctttttgtttagctttcttcgaatcattgcataaacggtgtcagtaataggcactcccaaaatgataattgggaccaacaatgaaataaaagttacattctttaaccccttcagagataaaacggcgatcataaaaccaatataaagtgcacccgtatcacccaagaaaatttttgctggatgaaaattatatggtaaaaagcccaataaacaggcagctaacataaaacaagcaattgggacatatagctgatgagtgtgcaagaagaaataacctacgatccccatggtagtcagagaaatcattgaaaccccatcagctagcccatcaagtccatcaatcaagttaactgcattagttaaagctaagatccaaaaaatagtaattgggaaactccaccaacctagatttacttcatgtgcgatgaatggcacctttaacacattcattctgattccagctaaaaagtagataatcaatgaagcgataaaaatcccaaacattttttgtctaggttttaactccaaaatatcgtcgatcaatcctgtcaaaacaattacgcttgaagcgagtaaaatcgaaaaaatttcatgagtcggaaattgctcacgcaacagaacaaaagtaccgatattaaaagtaacaaaaatccccagtccaccaatcgttggcattggtttcttattaactcgccgggcattaggattatcaacagctcctaagacaaaggcaagccgtcgaataaacggtgtaattgccgctgaaataattactaataagaataattcaacaataattttaaacatatttggctactttccttatttacttgttctaattatacaagtagtcagtattttgcacaaatagcaaaaaaagtttggaaaaattatcttccaaactttttaatttatttagcgatcgccacaactcttttttcacggataacggtaatcttaatattacctggataatcaagttctttttcaacctgattacgaatatcacgtgccaaaataactgtccgatcatctgaaatttcgtcaggttcaaccatcacacgcacttcgcgtcccgcttgaattgcataagcttgcttaacgccttgatagctcttagcaatcttttccaattcggtcaaacgtctaatataattttccaaactctcgcttcttgcaccaggacgagcactagaaatcgtatctgctgcaacaacaagttcagcaataaacgacaacttaggcacatcgccgtggtgtgcagcaatcgcatttactacaacatctggttcatgatatttacgagttagttcaaccccaatttctacatgggaaccttcaatatcatgatcgatggctttaccaatatcgtgtaataaccccgcgcgaactgctaatttttcatccaagcctaattctgcagccatcgtgcctgctagcttaccaacttcaattgaatgtgacaaaacattttgtccataagaagtacgatatttaagacgacctagtgtcttaactaattcaggattcatccggtgaattcccagctccatcaaagcactttcacctgcttcatagatgtcatcgttaacttcttttctggccttatcgaccatttcttcaattctagctgggtgaatgcggccatccttgattaagcgttccatcgctcttttggcaatttcacgtctaattggatcaaaaccactcaaggtaacaacctttggcgtatcatcaataattagatctattccagtcaaagcttcaaatgaacggatattgcgtccttcacgaccaataatccgtcccttcatctcttcatttggcagatcaacaacagatacagttgtttcggcaactgtatctgccgcgctactttgaatagcatccacaatgacctgattagcataatgatcagctttagcttttacttcttcgttactatttctgatcatctcggctcgttctttgactagttcatcagataattgactaagcacaatcttcttggcttcttcctcatccaacttagctacgtcataaagcttttgccgtctagtttctactaattcttcagcctcagttaattttgcctttaagctagcatactgctgctttaattggtcttccttttgcgtgagtccactttcacgttcatctaataaagaattcttatgatctaaggtatcttcacgttgttgtaaacgatttttctcccgagctaaattatctttcttggaatttaactcatcctcggtcttttgcctaaaatcacgaatttgttcttgagcttcaagaattttttcttttttagtattttctgcactttgcttaacagccgctgctgcttgcttttgtgcattaacttcagcttgtgctgcagcaacctgtgccttagcatcagctaaaatgtggtcagcatcattctgggcattttgagctttttgttcccaagaatgcttgcgaattgcataaccaaccactgaacccaccaagaatgaaacaatggcagttgcgacgggaatcataattgttaacatattattcatgattactatcgccttttttagaattattcacacaacttttatgataaagaacctatctgttcatgtcaattaaatcaaaaaaccttggaaaataaatccagggtttttgacataattatttagcttgttcagactttttatctgtagcagcttctttttctgtcttggcttcttcgcgcttctccttgatcttttctggatcttcacgatcagcaattgacttttcatcaatcccgtaagcttgacgcacttgcttttggatatcttgataaatatctggatgctcttctagatacttcttagcattctcacgtccctgaccaattcgatcactcttgtaagagtaccaagaacctgctttatcgataatgtccttatcagcagccatgtccagtaattcaccactttgtgaaattcccttaccgtacataatgtctacttctgccaccttaaatggtggagcaaccttgttcttaacaactttaattttaactctgttaccaagaacatctcctgattgcttaatctgttcagctcttcttacttccaatctaatagttgagtaaaacttaagagcacgaccacctggggtagtttcaggattaccaaacattaccccaactttttcacgaatctggttaataaagatggcaatagttttggttttagaaatattacctgataacttacgcaaagcttgactcattaatctcgcttgtaaaccaacatgggcatctcccatctcgccttcaatttctgctcgtggtactaaggcagcaacagagtcgactactacaatgtcaattgccccactggaaatcaaagtatcagcgatttgcaaaccttcttcaccagtattaggttgtgacaaaattagtgaatcaatatctacacctaaagcttcagcgtaagcaggatccattgcattttcggcatcaatatatgctgcagtaccaccacgcttttgcacctcagctacagcatgaagggctaccgtagtcttaccagatgattctgggccataaacttcaataatacgaccacgaggatatccacctacaccgatagcagcatctaaagctaatgaacctgttggcactgttgaaatttgcgtatcagctttttcgcccatccgcattacagcacccttaccgaaattcttttcgatttttttaagcgctgcatctaaagcagcctgtttttcgtctttggccattaatgtcctcctatttttcgtacctaataattatactttgaccgccgtccaatttgcaagagaaatgcaaacgaacgttcaaaggattttttaccctctattatttattacgctaaaaatcgccattatttttttacaaaataaaaaaagaagcaaatgcttctttttaatcattcttgacttaatactattttacattgagcccttgaatacgccccatgattggtggaagtaatcgtaacctgagtaaatagtaaagatcaacgcaaggtaaagtaagatagtaccaatgtggaagaagtcaccaatcaataagaaaatgattgataacatttggcaagtagtcttaattttaccaggcatctttgctgctaaaacttgtccttcattttctgctaagatcaaacgcaaaccagtaacagccaattcacgacaaacgatgatagctactacccatgctggagcaagtttcaattcaactaagaaaatgaaagcagtcatagttaacatcttatcagctaatggatcagcaaacttaccaaaattggttaccatattacgtgaacgcgcaatgtgaccgtcaaaccaatcagtagccgaagcaacagcaaaaacgatagcagcaataacacgactccaaacaacagttgagcctgctgcttgaacactagcattcccaccaaaaatgatgattaacataaatactggaatcaaaaagattctaaaaacagtaagtttattaggtaaattcattctaacactcctagattttaattgttgttattatttccaccatcattgccattgttagtgtctgctgatgattgagtagtagatgattgttgagtttgactactttgttgggtttgttggctactttgagtagtagtagatgattgttgacgactgctttgacgagtagcactgctttgagtagttgtacggctttgggtagaactactattggttgtattgttattagtagagcccgtattattagaactactattattttgactagtagttcccttagccttaccaatcaacaaagtaattgtcctgtacgcattgtttgctgtatatgggattttcttacctgcaatagtgattgaagtaccattatcgttgcctaaagtaatcactactctctctgcattgcttggcaaagtcatagtgtgcttttgattagcaagtaaagttgattgccagctattagcattaccattgacttgtacacccgctgaaatattttggttttcaccagcacgcacaactaggcgacggtttttattcaagccagtaactcggtactcattgtcactaaccttagtaaccttaactttattgactactacttttttagctttcttagaagatgacgatgatgacttttgtgatgaaacagttacatcattattatcagcttggttcttttgaccacctgaagaaagacgagcatacaaaacgtacactacaagaattacgataattacaccaagtccgatcgcaattcgtggcaagtaattcttccacaaatttttcttattgtcggtggtttctcgtacttcttcactcttattatcaatcgagttttctacgtactcatctggcttagcttctggtacatcatcgtggtaatcacttaataactccttaccatccaagccaacaacttgtgcatattgacgaataaatgctctaacataaaaatcgcctggaagtttatcaaattcattcttctcaatcgcttcaagatatctgctctgaattttagtagctttttcaatatctgcaattgaaagtcccttagcctctctggcgctctttaatttatctccgatatctgccatatttacctcttcaaattttaatttatcatgttgagtataccataaaattctcattacaacgtcttagttataaaagccatccacctgtaacataaattgtctgtcctgttaaataactactacgtcgatctagcagtgttctaacccagtatgaaatatcactgccattggcccaacgaccaactgggatttcatcttttacctcttgaatcgtatcctcagaaaagaatgcattcattttggttttaaccgcaccaggcgcaattacattaaccgttaagttattggaagcaacttcacgcgcataagcctgagcgaacctggttataccacctttagttgcactatagacgctttctaatgcactacctgcaccaccatagactgagcctaaataaactatacgactaaaatctcgtttcatcagttgtggctctaacaatttagttaacttaattggcacagtaagattaatattaatcagatcagtgatatttgctaatttttcatcacctaaaaaaccatacttagtaattccttgagcaaaaactactgcattaactggcaacaagtttttaacaaaatctgttaactgtgcatcccctgtcgcaaaatccaactgtagcgacataaaatcctggtcaggatgcttagcaaacagctcttgaactaaattttcagctttttgagaattagaatgataatgcaagtataatgaccaaccggcatctgccaaatctcgacaaatatcttgaccaataccgccagttgcaccaaagacaattgctcgcttcaactttatcaaccccttacttgttttctaagtaagcagaacaaagttcactgtctttcataatcttttggcagtagtcataaaactgatcaaaattcattgcctgcaatttagctatattttgtgctaaattttcatgatctaaattttcttcaattaattcaattgccaaataagacagatcattacttgtcctagcagtgcgtgctaaccattctttcttttgcaaaatgaagttttgtctaataaaacggtattccgctgaatttttcttaattggttccgtcaataccctctttatttctgcaattacttcttgagcttgaggacttacaccaaaaatagtagcaaaatcgccctgcctggtgtaattaacagaaatctgcagcgaatccattaacagctgcttttttctcatttcttcaaaccatggtcccattgcacttagttttgattctaacattatttctaacagaatttgagtcaaatcaaagcttgataatactttcttaaagtttttaaagcgaattcctaaaccaaaggaattagaattacctctggctggcaagacttgattatgtaacatgcgaaaactaacttgtttttcagctgtgcttttacctttcccgtgcaaatatttttgctgcagctttcctacttgccgcaaaatcgtttgcacttgattatcagaaaaatcaccgcaagcaacaaattgcatcttttctggcacatacttagcctcataaacttgggtcaagtttttcactgtaacttgattaattgattctttcgtacctacaacttcgatccctagattagaatcaccaaacatatcatgcataatcgcattatttacgctccaagttgggtcatcctgatacatggccaattcttgttcaataatcggagcctcttgcgcgatattttccttagtaaaatacggctgccctaccaattcaaacaagagatcgatcattttaggcgtatgctcaattccactacaataaaacattgtttcattaaaagacgtgaatgcattaacgtcagcaccaatatcttcaaattgcgttgacagatcaccatcttttttggcaaatagcttatgctctaagaaatgagccgaaccggcaaccttttgtggatcactactaccaaagtcaacaattataccgaaaaatcgttgataaaaatgtggctttaaaataatttcggctttaaagcctgactgatattcttttttgataatttttggtgtcatcattttaaaacataactttcattaaagaataaattttgtacgaaagctactaactgcttaggtgtagctctcctaattgcattttcacgatcaaagtctaaatatcccgagaacaattcatcacgcaacatttgacccatctgccagttttgaccgtctagaccaatcttcatattacgcaaaattgcctttttagcctttttaaataaatcatcttctacttcgccctgaactagtttacccatttcggataaaataatttttcgagccgctgcaatcttactaggatcaagtcctgcactgactaaaaacaaagaattattggcaaagcagcttgcttcaacattataagctgctcccaattgctcccgaatttgcgtaaataatttagatgattgatcacctgccaaatattgcgataataatattcccattacttgaccgcgataatcaatactttgttctaaaccaaagcccattaacaattgagcttgcacatttccttgatcatcctctttttcaatcaactttcttttagctggaatagttagactagctgtttgaaatgatttagttaaaccagtttgttgaaacatagcctgagctaatttagaaaccagattattatccctggtcattcctaaaatttgcattggtacattagctaaattacgccaataatgcatcatagtcgtgctagtcgcagctttgatttcatctagtgagccaataaatgtctccgcataatcaggttgatcctgataccacaatttaaaaaactgctccaacgcataattagatggttgttcaatcagttcttgatattcttctgctaattgacgtttagcatattccaccaaaggttctgcaaaattaggttgattaactatttgtgcaatcacattaagaatttcttcatacgtataatgtggatccaaaatctcaatcggctcaacaaaattggcataataagtcaaaagtatttctttaccaaaaacttgtggcataatctccagctgtaaatcatataattctgccaatcttttttgttgtaaagcaagtgacggataacttaagctgctattcatctgtattcgcgctagcaaactagcataagctaaattatgtttagtcagcggcaaacgcaaaaaacagccaatagcggctgttgtaaactttttattttttctaattgcaatattagttgtgagcattgtttgaattaccttcattctttattggtggcactaaaacttgtcgtggcttagagccttcagatggaccaacaatccctttagcttccatttcatcaacaattctagcagcacgattataaccaattctaaacctacgctgcaacattgacacgctggccgtctgttgacgtcgtactaaatcaacagcttgctcatagaattcatctgctggctcatcatctttactatcagcatttgatgaattttcaccttttttaggaatcattgtctcatcataactaacctcttgttgcttcttaacccattcaattacgcgttcaacttcatcactagcaatataagcaccttgaacacgttcaggtttagatgccccaattggcatataaagcatatcaccacgaccaagtaatttttctgcacctgtttgatccaaaatagtccttgaatccactccacttgatacagcaaaggaaattctcgatggtacatttgctttaatcaaaccggtaataacatcaacacttggacgctgagttgccaaaatcatatgaattccggcagcacgtgccatttgtcctaaacgaacaatcgcgccttcaacatcgtgaccaccaaccatcatcaaatcactaagttcgtcaactacaactagaatataaggtaacggcttcatcactggtttagttttatcacgattgttttcagcaactttttgattatattcactcatgtttcgcacgccaccagccgcaaatagcttatatctgcgctccatttctttaacaactttgcgcagtgcatttgcggctagcttagcatcggtcaccacagggatcaataaatgcggcacaccattataaactgaaagttcgaccatctttgggtcaattaaaactaatttaacttcttcaggccgcgccttcattaaaatactggctaaaattgtattaatcgctacggacttaccagaaccagttgaaccagcaatcaataggtgtggcatcttagctaagttggcagaaataatgcttccagttacatctttacccaatggtacatccatcggatcgcttttggctttattatcttgatgttccatcacgtctttgaatgaaacaacagacgttgctcggttaggtacctcaattccgataaagggcttaccaggaattggtgcttcaattcgaatatctttagccgcaagcgccaaagccaaatcatccgctaagtttacaattcgacttaccttaacgccaacagctggctggacttcataacgcgtaatagttggtcctaaaatagcttttttaataatcaccttaacgccaaaactcttaaacgttgattgcaaaacttgggtatttttcttaattaaatcacggtcagtactctgatcagtcgatttaattggatcaagtaagcttaaaggtggcatcttataagctttattgactggcgcatcagtttttagttcaccatgatcgacatcggctaattcctgctttaacttttgatcatcttccgcaaaagaatgtgacttaggtagttcctttaccccgtcatcatgttgtggtgcaatttgaatttgcggttctggatcaggtgtggtctctggctcaacttctacgtcttcagccgtcggcgttacatcgtcatcagttggatcggcagggtcaaagtctgctacattaggaaaaatcggtttatcgtcatcaactaaatcttcgtcttgttcctcttttttctgacgccgcttttccaaaacgtcattatatttatctttgacctttaccccagcttctttattctttttgatgaataattgactaactgtctggaatttttcgataattgttctaaatttaacatcaaaaaacatcaaaattccaattggcagcaataaaatagcaaaaacacggacaccgatttgccctagtagtggataaaaaagttgataagctaatgaaccaattaatccaccaccaatgctctcagtgactccagcacgaccaaactccgcggccattgcatgccaaaaagaattcaggaaattactgttaactaattcatgttcaaaatacaagttacattgaattaacagaattcccaaaaaagcgattgctaaccccaagctacgcttaattgttaagtgaatcggttgattatagattaaatttactaggccaaaaagtcccagtaaacctgccgcaaacaaataagaatccccgaagaacattcgaatcaaatttgcgatttgcttacccaaaataccgaaacggacaaaagccagccccgctattaaaatcaagactaaaccacaaatactccaattaagattttgctttttgtttgcttttcgcttattgtagctctttttggcctttctttgtttcttttttgcaggcatgtactcacctgattaattatcgaattcagccttgaagttcaagttaaccggctgacccaaagttaattgggttgtttcatagatcaaggtctcaagttgctcaactaatggtcgagttagtaactgccaatctgaattactaatgtcagagccatcaccatggtaatcttttaattgcacgatttgatgaatcaagccgcttgcttcaaacatagctggtgcaggaattacatcatattgaatagcaacatcatagtaactaccattttcttctgaatgctcatcgtcaccgctaacatctaattttctaattcctggtctaacgtcactaattggtttggtatcttcatcaactaaatcataatgaaatgcctgtacgataatatctgtctgtttttcaaaatccattatttattctcccctagattacgttcatatctttcaggacgatcatagtcatcttttaacttgtcattttcataatgatgggttgtttccatattaggaaaaccttgctggcgtaaagcttctagcaaaaccattgctacagaattagacaagttataacaccgaatgttatcagacattgggatacgtaaattacggtcatagtattcacgcataaaagtttctggcaaaccagttgtttctttaccaaaaacaaagtaataattcttgttaggatcagtataatcgacttgtgcataattttttgatgagaatttagaaattaaatacatctcatcattaggccctaaagtcttcaaaaaggcattcaagtcatcatgtctgcgtacatcgaccttatcccaataatcaagacctgctcgcttcatttttttattatcgatttgaaaaccaagtggttcaatcaaatcaaggacagtgttagtccccgcacaagtacgagcaatattgccagtattagctggcatcaatggttcatacaaaactacatgattagtcattcaaaaaactccttatcaaaaaaagcgtagcttttaagccacgctttaaaactatctagtatttattcgctttcgtcatgatctgcatcccccgtggtcgaagaaacagcattctcttcaaagagtttagactctcttcgataataattgtacacgcgagacacaataatcttcaagatcgcataaattggaataccgaaaactccaccccataagccccagacggcactagcaccaatcaagagtaaaattgttgtaattgggtgcatttccattttattccccattacccatgggctaagaattcttgattcaattgtttgttcaatagcaaaaacaattaagaccttaattaacattgaacctgaagtcataattgaaattacaattacaggaatcattgctaatggtgtaccaaagtatgggattaagttcataaacccagctaaaattgccaaagccacgccatatggtaaaccaattagaatgtaacccaatgagaacatcacacctacccaaaaggcaacagtaatttgaccacggacatatgaagcaacagcatagttaatatcatataataatttgctaaaactaggttgccatttttcaggtgcaaacttggtaatatatggccgcagttgatgaccatcttttaacatgaagaataaaataaacggtgcagttaacaaagtcatagccaccattgtaataatgctgacggcagatgaaatattgccgatagttgcattgatggtactttgtccagacttaaataaggtcttctgcgtattatcaatcatgcctttgatactgcctttaaatgaatgtaaacgcggatcttgcaacgcattttgtgttgcattaaccgcatcattccaaatatgaggccagttctttatcaatgaattaatctgattctgtgcaattggaaccaagatattaataatccaaattaatgcgacaactactagtaagaataaaactataattgtcaccactcgcggaatcttaaattttctttcacaccaatcaacaaccggattcatgatatagtactgaattaccgctaataataatggcggtaaaattgcactaaagaagatccaggcaggattcaatacaaaagatactttattaaagacccaaataattaaaaagaatagcaggacgtttaataaaacaatactaaaacgattatctaagaaccattttttaaaaacagttccacccctatgttggttattttccatctattcatcctaatttttaaatgtgttcataaacaatatcatcatcaaccttaaaattaggtaatggttgatcaatatccggatcaaagtagatcgcattagcaagtggcgtcttagaaacggtacggttaaagaacaaggttgcgtgtcccaatgccttcatgttgctctctaccatcggaccaacatagtttgcaacataggtttgaccatcaacagtgattgtatcaccttttttaaaaacaaaaccactaactggcgtctcagtactgaatttttgaatgacagaaacgtcttccaaatccttattagcaccctcgccaaataaaattaccatgccatctttattatcgacggcctttttaccaatttttttaatatttgcaatccatttcataatataatctctccttaaaaataattttagcataagaaaagctgcttaaaaacttaagcagcccaaaatcggcgattattttttgctcaacaggaaatcgtgtttttaagcgtctaatccgctttcatgctatactttattttagacttatttttatttagagatggaggcccacatatatgaaggttttaatcggaggttacaccaaaaaaacttccaaagggatttatgaattacctattaccggtgcagcaaatgatgcccgtttaggcaaagctgagaatattattagcgttggtggtccaacttatttccgaaaagatggtaatttaatttttactgttaataacgctggcgataaaggtggaatcagcgtctttcaattaagtgatcaaggcgcaaacgaagttgaccactatttaactccaggctcttcgccagcttatgtaggaattaaccgcaccaaaaagttgatttacattgctaactatcatactgctgtcttgtccgttttccgctacaacgacagtggcaagctcgatctagttgatactgtaactcacaaagctgaaacgttgggtccgcgtcctgaacaagttgacggtcctcaccctcacttctttgatgaaaccccagctggtaacttggttagttgtgatctaggcaatgataccgttgatttttatagattagaaaatgatcaattaaaacacattgctcaatataagtgcgaaactggctttggtacacgtcatatcgtcttcagtaaagatggcaattacttctacgttgtcggtgaactttctagtcaaatcaatgtcgttaaatttaacgaagacacttgggactttgaaaatattgctacttataagacaattcccgctgattttactgaccataacggagctgctgccttatatattagtcaagatggcaaatatgtttacacttctaacaggggacataattcaattgctgtcttcaaagttaacgacgatcatactttgagcctggttcaacgtgtatccacttttggtgacttccctcgtgattttaattgggataaagatcagcgctacgtcgttgtcgctaatcaaaatacagataatgctactctttacacaagaaacgctggtactggtagcctaactcctattcaaaaagaaatttccgtaccagaaggcactcgcgttcttttcaccaaatagtaattaacattagtaccaaagtcatggcgcaatagaacgtcatggcttttttattcctacaacttaaagtaaaatagaaataaatgaaacaaaatataagtcatgtggtaataagtcaaatgaaaggcgatgatatttgttctttttgatcataaatttgagtatatgaaactaagccttggtaaaggttgatttttttaatgttaaacttttgtttacttttaaatttagaccaatttttgaaattaagacctcggtgtcctgtacagtttgtcatctttgagcaatttaaagataactcgtactaattttcttgcagttaatgtgcaagcacgtttatgcggcgagtagacagcttcatcatacttcttttggtaatattttttgaaaacaggatcatgtaatcttgctagattggcagcttcaatcaagtaatatcttagatatctgtttccagtcctggccattggagtatgttcgttgctgtgatctcccgattgatattgattccaggttaggccggcatacttagccagctgttcttctttatcaaagcgatcgatacttccgatctcagcgataataccagctgtataggttttgccaataccgggaattgattccagaattttgctttctggtaatgcatcaacgatacgatcaattgctttttctagatctttaatagattcattaaagctttgaatcatgttgtaatgaacagaaagcactgcatcaattgaatcagtcattactttgcctaagcgatatgaacctctaacagctttcttaattgctttagccaaggtatctggatcggaaaagcgtcctctgcctttaacctgtaagtaagaaattaagtcttcggtaggcatatccgcgatctcatccagagttttactatcggttacaatagacatcattgtagcaccgaaaagaggagtattaatcttatctttatcgacagtgattagtttattaacccgataatataaagcttcaatgaagtgctgtttggtacgagtcagttcttgaactaattcatatctggtacgcgttaaacgctctaaagcaagatagttgtcttgtctggcaatgcttactcgataatgtccaaagcttagatacaaagcaatgtaataagcatcgagaggatcagttttactttcttcaaagactttatgaaacctgctggtttctttggggttaattacatcagtctctacattgagcttttgtaaatcttcgtcattttggaaaaagtaagcaggatgaaaactgtaaatagatgtagcttccatgccaataatgatttgatcatagtgtttattttgagctagatctaaaatttgttttttcagttcactagcaccataaagatcattgacaaagctatcgttaattaagcgtttgttttgatcttctgaatcaagtgcaacgacctgtaaatctttagaactaacatcaataccgacaaataatttcattggaaatggcctcctttctttcaaatttctgatcatagattttgatcttcacatgttaacccctaattacagttcttaagttcaatctcgccagtataagtattcactggttgcttctttgaaagctgcacctaatcccaattgctcaaggactagcaaaaagaagcaatcaatacagcatgtgagttagagcataaaggaactgtctgggtggcagacttataaagcagacaaaactgcaggaggtgataacctagaccagttgaccaaagccaatgacaattagaggctaacatgtgaagatcaaaaagcaaatactaatttgattaattatcacaatatgactaattacaatttatataatacgagaaggtgacaaagtgaaaagaaaaataattcgaatattacttttcattcttggcgggatattagggttactacttctgtataaactctatttaaattaccgtcctgaattgaatttattacttcattttgatcaccataatgaagaagtactcgttaacatggtccgtagccatggtattgaagacttagcctttttatttttacttaatgcgatctgtgtagcaattcctggcttatccaacggaatcttttgtgttctcaacggaatcctttatggccctgcctggggatttattgttaattggatcagtgacattttaggccaaataattttaatggaacttttgcaaaaactctatgacatgaaaaagatgtctaacagtaaagtttataagttattgactggattaaaatcaccaatgcttggattaattattggatatatgattccatttattccgagtgcgacagttagctatgtcaacattatgattaataaggagcaacgtaaaaaacagctaataccaatcattatcggtgtcatccccttcgcttacttatatgcttatggtggcgattcaatcttgcacttagacggaacacgattgattaaagttgtaatctcattcgttgtcattgctttaattgcagtagctattttgcttagtctgagagcaatcaaaaagcgtacaaaaaaagcttgaatttactcaagcttttttattatgcctagcatatttaaactaagttagcttcttctaacagttcttcgacccaagttctcttgattttcttcatccctgttttgagagctaacttctcaggtaatggcatctcttgatcaactaatttcttcttgtcagacatgtagtacatcgcacgaagcaattgacgaatatcataaattgagtcaaatacttcaggtacaccacggtcaacgttaagcaatgtataaacagcttccatggcagttctgacagaatattcggtggtaaagacagtgtctctagttggtgattcggcaaaattgccaataaaggcaatattaactgatccttctggaacaacatctggacggtccccatcatgacgaggcataaagtaactagtgatatatggcatgtaaactggtacggtattcatattttcttcactagccaattcgctgatttgactctctggcacgcctaagtgatagagcatttcctcggcaatttctttaccagtacagtcaacgactctcttcttgatgtaattaccctcagtatcagaatacaaagcataaatccaaacaacgatttgatctggattctggctcttaaagtgaggttgacggtgaatagtaaagctaagttcccaattagagtcaacaacagtgataattccaccagtattaactttaccatcgtaaaggctgcgcttagtcaagcgttcaaagtatggagctattttcttattttccaaggtaactgtagctgatacgaaccaactacgctctggcaagttttcacagaagacatctggatgaccaaagtcaggatcttgtttagccaaattttcccataatttccatgaagagcccttgtcgtgagtaattggtgctggggtattttgatcaccataagtagaactttcagtgattgaaccgttagtcacaaagacaatatcatctggggttaaatcaatatcactttgctcaccattcttggtcatcacgatcttcttggcaaccttttgcttgccctcatgatcaacaaccacgttatcaacgtgacaatcacattcaaattgaacaccgtgatcttttaaatatgccaaaagtggcttaaccatggactcatattggttatacttgttaaacttcaatgcggtaaagtcaggcaaaccatcaatatggtgaataaagcgcattgcataacgccgcatttcggctgctgagtgccatttttcaaaggcaaacattgttgcccagtatgtccagaaattagtcttaaagaagtcatcactgaagaattcttcaattgtttcaccttggagttccttttccggtgtcatgattaacttcacgatttcattagcgcacttacctagaccatattgaccatcacttggtaagcgatcaccgcgattataaattagacggcaattggatgagttaggatcttctttatcaagccaataatattcatctaagtatgatgcgccagggatttccaaacttggaatcgatctgtacatatcccacaaacattcaaagtggttctccatttcgcggccgccccgaaccacgaaacctgcattaggacgcttagcaccatcaagtgaaccaccagctacgggtagctcttctaagatatgaatattttcacccttcatttgtgcatcacgaactaaaaagacagctgcagaaagaccggctaaaccactaccaataatataagcagattttttatctacgcctgcgggctttttggcatccgcaaaagcctcataattaccattggaatagtacataaagatatcctcttttctgtataagtatagtttttaacattacactttaattataaagaaagcggttactagatgcgagttttttagaagttttagctaataactttagaattctttattaattagtttctgccacagttcttgcatatcttttggatcattcaactcaattgttttacatttttgttggctaaatggatccggaaaatttaaataaaagcaatttaaggcttggcgtgaaaacccatcttgaattccatataaaggatcaccatataaggggtgtcccagataagccatgtgaacacggatctgatgggttctaccggtaagcaagcgtaactctaccaagctagcacctgtaacctgatctaggactcgatacgcggtttgagcgtcctttccatctgccactaccgcacgtttaaccccactaccctttttgccaatcggttgatcaattaaaccagttaactcattcggagcaaaattgccatgtacaattgcatgatattttttgacaaatttctccttgccaattttactaaaacgagcatgggaaattgcatttttccccaccaatactaaaccagatgtatatcgatctaatctagtaataacatgcggcttcaaatttttctgtcctttttgggcaaaataacccaacaatcgattgaccaccgcatcatcatcttcatagcgtgagggaattgacaacacacctgcaggtttgttaactacaagataatttttattctccaacacaattgatactggattattcgatggctttaaaaaatcatttttcttttcttcaccactgataaaaatcacttcatccccagcacgcaaattaaagctagtatatcttcttttatgatttactaaaatcatgccatgatggtgtttagcattgtttaacgcttgatgcgaaaaaccattttttaacaaaaaaggacccagctttttggggtctctttcttgcacaattagtttaaataaactagtcatttttttcattatctccaataaacgcattttgtacgcgtgaccaaaaatgatggtggccaaattgatcaaactgaatcgaatgccgcgaaattcgatattcaatcttcttagcattacgtacatcaattcttgctccatcaactgtcatcacaaaatgatctgcattaggaacaatcgaaatccattgatcaggcgcaatcacaattggtgatgacaaagttctaaaaactcgattattaattgaggcaatttcagtcatttgcaacgcttttagccggggatgaattactgcaccacctagtgatttgccataagcagtcgaacctgttggtgttgaaacgcaaagaccatcgcctcgaaagttttcaaataattgatcattaatgtacacatcggcctctaatgtatgtgaaactcttttaactgctgattcattgacggctaaatggtaatgagtttcacctgattcagtgagcatctttatttctagtaaaggatacttcgctggttcacccttggttactgctaaagcatcaaccattttttcaatatcatagttacgccaatcagtataaaaacctaagtggccagtatgaatcccaataaagcgcacagaatctacttgattttcatagcggtggaaggcattgatgagggtgccatcaccgccaacagtgatcactacatcaggatatctagcatcaaagataaagcccttttcctgaagcagcttcttaagctgcgcaactgtctttaacgtttcatcgtagttattatgcgctattgttactttcataatttttctttgcccttatttttggtaaaaattttctgagcttcttggacctcatccttaattgacgacatttcttcgtctagtctataagcggcttcagccgttgattttaatctagctgaaatgtcatcaggatagacaccttgatatttgtaatttaaagtatgttcgacagtagcccaaaagttcattgccatagttctaatctgaacttccgcaattaattttttcggaccttctggtaagtaaaccgtatagttaatcaccatgtggtatgaccgatatccactcggcttagcattttgaatataatcacgctcctcaacaacttccatatcatctcgagcatgaatcaaatctactaccttataaatatcgtctacaaattgagtaacaatcctaatccctgcaatatcttgcatatcagtctcaatgacatcaggactaattactcgccgtttcattttttcctttatagaatcaactgtctttacccggccaattacaaattcaataggtgaatgttctcccttagttaaaaagccttgtctaagggaacgaaatttaacctttaactcgcgaacagcttcgttataaggccacaagaagttatcccaatctaattccatgagaaaacattcctttcttaagcaaacaaactcattttaccatataattaagttaaacagttcggaggaaaaacagatgagtaaaaatcgagaaattgaagcaaaaattcttttaaataaaagcgtttatgatcagatcactgccgcttttccaatcaaaagtgactttacccaagaaaattattattttgatacagcagatgatttattaaaaaatcatcaaattagcttgcgtattcgaatctatgctactcacgcagagcaaacaatgaaggtaccggatcctaatcctgtacaaaagaatttccatgaagtaattgaaattaatgataaattaactcacgctcaagctaaaaaattagtagcaaaaaagcattttaaattcactggtaatattggcgcatatctagataatcattttgccaatgaccaaaaaaagctacatcttttcacctggagcaaaacccgcagaattttgatgaacgggccacaaaactgtgaattaactctagatgctacgtcttatccagataactatcaagattttgaattagaaatcgaaaatactaatcctgctttaattcaaacagtattaactaaacttgaacaagaatatgactttgaacaaacggctgctaacactaatcaaagcaaaatagctcgtgcaagcgctcaccaaaaatagtatatagaaaataaggcatattttttgtcacttattttttttcttgctaaagtaactaatagtaaatcaccaaagaggtcgagattatgtttgagatttttctattcatcaatccaatagggatttattgttatgacactgaaaaacagattcgtaaaaccgttgatgaattaggggtcgacgtttgttatcactatattcccattgcaaatgtttgtttaatcaatgatgatgcgattcgccgacgcaaagatgaccagaagttgcctgatattagtaatttttctagagcaacttatgaagcattagaaaattaccacgcgattaggctggcctatggcaacaaaaaagcccgtcaatacctgtatgaattacaaaaaaacttgagcaaagatgcttcagcttatacacctgagctgcttaagcggatcgcaaacaaattacatatcaaggatgcggatattcaggcaatcaaacaaactgattacctgcgtacttctattgaagaagatcaaaaactagccaaccaatggaatattaaagctactcctaccaccgttatctttaacgaagacaacgagcaaaatggagtattgctagagggaccaatcaatcaacaggatttagttaatctaatgcttccagattgtcaaaagtgtttttcagactatttacctgcggagcatcatttacgccttatctaaaggcgttttatttttgcaaaaaatcactcacccgatctctttcacctgggttacgccaagtagcaaaaactttatcaggtaaatcatcaagagttaatttgcgttcataaagcatctctcctattttcaatcctaactttgttttttgcataatttgctggcgtaaatattttctttgagttgcaatgttcaaagaatattcttttttgaatggcttaaagcgccaaaaatcttttatccccaattcatcaaggacaaatgatttactttgataaaccaatttattagctaccggttcttctaaaacattatattttaagcaaaaacgatttctctgtggattaatttctaaatagtaattcccccaagctttattttgtcgaaagaaaatcaactgtgtgcgtttcaatcgccgtttcaaatagtgtcgctgtcccacaatccaaatatcttttacaccaattttttgataaagctgatgccgatggttaaattcttgttgaatcaacggcgcacattgaacttcaaacgctaacttagcagttgctaagacatctgcacgcaattgtccttcagctaatggaatctcaacttctgccggaaaaccagctgccgtcaaagctgacttcaacagcattttcgattggtgatgctcctctttttcacccattaaattactgtacttcacaagatgcttaaaaaaggctgctttttgctccgacataaccaaaatcacttttttattgcaatgtggacagtgataattatcacgattcaatttcttttgccttgcattaactaaacatgcttcgtcaactgcaaggactaatttcttatttaacatggctgcatacatttttctcacccatgttttattacgtaaaaaagagacggaattttgtcccgtctctttttctttaaagaatcttaataattagctgcttttaaaaagtaatgtcgaatctggcctaaagcattttgcatcaataagcatttgcctgtttcttcaactacacgcatcttatcactatcgaccttaaaaccaaattcgttggctattgtccacgcatctgctggtttaagctcctcatattcttcatcaagaaatgccaaatttaagaaatattgtccatgcaagtaatacaagctagaagctaaatcatttgccttaaggttatcagctaattcaattagactacctaaatcatcaaaatagtaagcctgagtcttgcgcgatctccaatcagttggctcattgtttttatcatcttggttaaaaaagttgtgagtagctggtccttgaggagccgaatttgaattcgtactctcctcatctaaatcaaagaaactttttgaatcatccgaattcgttgatgattgctcatccttaggaaagctatcacccattagtttccttaaattctgtgcatcgtccggcttaactttggtgatcatcaaatctaatcccccattattaggcattacttgaaatgatactggatcaccattggcaaattcatggtcttcatcgacctcatcaagaattttatagaagaagtcttgaatcttttgtctattacctaataaatcaagcattcccatcccacgacgagccaattcagctttatcaattcgaactctgatagtattcttatcaatatgatctacctgcacaggatctcacctccatgaattaatatatctattgtagcgtatttttcgtttaaaataaaagtgttagtctcaacaaaagccttaactaacacttttcaatcattttataaatctgcaatcttttgtgcttcagccaattccaaccgacgaacttttcgtggcaagaatcgacgaatttcatcttcattgtaaccaacttgaagtcgacgatcatccataataattggtcttcttaacaaactaggattcttttctactaaatcaagtaactgatcaattgataaatcgtctaaattgattcgcaattgttgaaaagctcttgagcgggtagaaatgatttcctcagtaccattttcagtcatccgcaagatctttaataattcttttttagtcaatggttcagaaaaaatgtttctttccttgaatggaatattatgtttttcaagccacgctcttgccttgcgacatgaagtacaactaggagagacatataaatctaccataaaaatcacgctcctcagaacaaatatttgtatacgtttctttactcatagctagtataccatataagcttctttttcgtaagtgcttaatttatcgtttacctctgctatttacttaatactaaagataaaacgtgaattatttgtgaagatttcgttcgttttgtttaaaattattaaaaataaaaaaagagacatcacagtctctttttgcaaattaaaactacttgttcaattttttcattaaattattaactaatttttcgttgtcttcagcagtttctgatacataacaagcttcgttagctaattccttaatgtcagcagtgttcaatttcttcattaagcttctgatacgcaaaattgaagttgcactcattgagtattcatcaagtcccattgaaagtaagattgggaacatagtgttatcaccagcagcttcaccacacataccacaccaaataccgttttcatgagcaccatcaatagtgtgcttaatcaaacgaagtactgatgggttatatggttggtacaagtatgacacattatcattaccacggtcagcagccatagtatattgaattaagtcattagtaccaattgagaagaagtcaacttcctttgcaaattgatcagctaaaacggctgcagcaggtacttcaatcatcataccgacttgcaagtcatcaccaatcttaacgccttctttagcgagcttatctttttcttcagctaaaatttgcttagcttcacgtaattctgctaaagtaccgatcattgggaacataattcctaatggaccgtatgcagatgcacgaagtaaagctcttaattgagttctaaagatatccttgtattgcatagaaagacggatagcacgaacacctaagaatgggttcatttcttctggaagatcccagtaatcaaggtgcttgtcaccaccgatatcacaggttctgataatggtttgtttaccattcataccttcaataacttccttgtaggcatcaaattgagcttcttcagttggaaagtcactagagtccatgtacaagaactctgttctgtacaaaccaatggcttccgcaccattatcctttacacctggcatatcattaggtgtaccaatgttagcagcaatgataaatttcttgccatctgcagtaactgatggttcattcttaagcttagcccattctgccttttgcttaaggaatgcttcactcttttgcttgtaatcagctacttgagcgtcacttggatcaataattgcatccccgtcaagaccatcagcaattaacatatcgccgttcttaacatccttagtaattgagtcagtaccaacaacagctggcaattcaagtgaacgagccataatagctgagtgagctgtacgaccaccaatatcagtaacaaaacccttaacatactttttgttaagttgagcagtgtcacttggagttaagtcgtgagctacaacaattacttcatgatcgattgaagcaggatttggtaattccttaccaagaaggtgagccataatacgctttgaaacatcacgtacgtcagcagcacgttcttgcatgtaaggattatctgtcatcccttcaaaaatagcaataaacttcttagcagtctcatcaagagcagcttctgcgttgatctttgaatccttaatttcattctcaatggcaccagtaaattctgggtcatttaaaatcattaagtgtgcttcaaaaacttgagcttcttcatcgcccaagctttctttagcaatatcatgaatcttttcaacttcagcagttgaagtcttaattgcatcgttgtaacgagctacttcagcttcaacatcagcaattgaagatttagagaatgaaagatcaggctccacaagaagatatgctggagcaatagcgataccatcacttgcagcaattccttttaaagtcttggtcattattcagctaaaccttcttttttcatagtgtcggcaattgcgtccaatgcgtccttttcgtcatcaccttcagcagtgatagtaacatcagcattttgaccaacaccaagtgacataacacccatgattgacttcaagtttactgacttaccgttgtattccaagttaacatctgagccaaactttgaagcagcttgtactaaaagagtagctggacgtgcatgaatacctgtttctgcaatgatatgaaaatcgcgtttttccattataaatatctcctttaaattgaaaaattaaactggtaataaatacccattcgagtattagattatcatgtttttacagattagacaactgcaatgtaacagtttacattatttattcatcggtattcgtagcggtatacacaatcgcgccgcctctttctgccctaccggtaatatattgtctttttccataatttctaatagtcttttgaagatcaaacgcatcttttggctcaactttatactcttttatctcacctgagactaattgatctagaattttctgataatccaaaaatatcaccactcttttaaaactttataatttttccactattaattctactatttatattcaattttcaaaaatattaatattttgtttgcggtaacaaaagcatttcttacaaaaaataagtgtttgagtcttagcacttgactaccaagagtgctaataatataattttggtacagttgaaaagaaaggcggtactatattttgctttgccaaaattgtcatgagcggcccgcttctattcaccttttcactaaggttaatggccaaagccgcgaaatagatttatgtcaacactgttatcaagaattaaaaaatcaacaaggaaatcaaggaaaaatgaataataatgaattttttggcgactttgatgatttattcaacgcattaaacggaaataacaacaatgccgcaaacaataataatgaaatgagaaataacgaccctagaatgcaaatggggggaggcgctggtaatggtggtcaaaacggcagaagcctacttgaccaatacggaacagacttaactgcccttgctaaaaaaggcaaaattgacccagtaatcggtcgtgataaagagattgctcgggttatcgaaattttaaatagaagaactaagaacaaccctgttttaatcggtgaagcaggtgttggtaagactgccgttgtcgaaggcttagctcaagaaatcgtagatggatcagtaccagcaaaattgcagaacaaacgaattatttcattaaatgttgtttcacttgttcaaggtaccggtattcgtggtcaatttgaacaaagaatggaacaattaattaaagaattacaacaaaacgacgatatcattctttttattgatgaaattcacgaaatcgttggtgccggtaatgctgaaggtggcatggatgccggtaacattattaagccagctttggctcgtggcgaattgcaattagttggtgctactaccatcaaagaataccgcgatattgaaaaagactctgctttagctagacgttttcaaccagttgaagttaaagaaccttcaattgacgaaacaattcgcatcttaaaaggtattcaaaaacgctacgaagactatcaccatgttcactacactgatgaagccattgaagctgccgcaaaactttcagcacgttatattcaagatagatttttaccagacaaggctattgaccttcttgatgaagcaggttctagaatgaacttaaccattccttatattgataaggataaaatgcaagaaagaattaatgccgcagagcaattgaaggaagaagccttaaaaaacgaagattacgaaaaagcagcctactaccgtgatcaaatggaaaaatatgaaaaggttaaagatcaaaaggtagatcctgacaagtcccctgttattactgataagatcatggacaagatcgtagaagaaaaaacagggattcctgttggtgatattcaaaagcaagaagaaaaccaactgcaaaatctagctgctgatttaaaggctcacgttatcggccaagacaaggctgttgaaaaagtagctcgtgccattcgtcgtaaccgaatcggtttcaacaagtcaggccgtccaattggttcattcctcttcgttggtccaactggtgtcggtaaaactgagttagctaagcaactggctaagcaaatgtttggctcagaagatgcaatgattcgtttcgatatgtctgaatacatggaacaatactcagtttccaaattaattggttctgctccaggttacgtaggctacgaagaagctggtcaattaactgaacaagttagacacaacccatatagtttgatcttgcttgatgaaattgaaaaagctcacccagatgttttgaacctcttcttgcaaattcttgacgatggtcgtttaactgactcacaaggtagaacagtttcattcaaggataccatcattattatgacttctaatgcaggacaaggcattaagaacgctagcgttggctttacagcagaaaacgaagatgaagctaatgaatctgctagaaataatatgagccaattctttaagccagaatttttgaaccgtcttgatgatgtaatcgaatttaatgaattgactaagccagacttgcttaagattgttgacttaatgttgcaaaataccaacaatatggttaaggatcaaggcctacacattgatgtaactgctgctgcaaaagataaattagttgaagatggctttaatcctgccttaggtgctcgtcctcttcgtcgtaccatccaagaagagattgaggataatgtggctgatttcaaacttgatcatgcacaggctaagaatttaaaagccgatgttgttgatggtaaaattgtaatcagtgatgaagcaaataatgaataggatttaataaaagacaaagtccaagttataccaaaagatttcgaagcaatattcgaaatcttttttccctgaattgtcaaattaagtgcaacagttaggctatgaggaaatatattgcttgaagagttcttctgctgtgtgatattggaggattcggcgatatttgtggttaatggcatcagttgcctgttgaacataagcttttgacttgtctttcatgctcttgcccttagggaagaattgacgcaaaagaccattgcagttttcattggtgcccctttcccatggagaatatgggtgagcaaagtaaatctggcagcccttgatcttggtcatatccgcaaactcagagccattgtcaaacgtgattgatttaaaccaggcaggatgtctgtcaatctccttttgaagcagcctttggcatgtgcttgcccgatagtcaggaatcttgataactacttcaaagcgtgtggttctttcagtcaaagtcattaaagcaggctgattcttgcgtctgacgcctttaaccagatctccttcccagtgcagcggagcttttctgtcttcaatctctttaggacgctgttcaatggaattgccaagatgcttcttgtgcaaagcgtgaccgccatggctgtgatgacgcttgttcctgcgtcttttgagcttcataggcagatcaatattgcttatgtccagcaagccctgatcaatatagcgatagacagttggtgtgctgggacaagggtagcctggcatagtccttttgaattcaccaacgaactcatcgatgctggtggcatcaaatttagctttaaagcgtctggagagcattctcaaaaagacagcataatgcttcaatggattgcgctgatagcagtttttgcgacgcttctcataataaatctgtgcagtatcagcgtaatagtgctcatacaataaatagctgctgtctctttgcaggacacttccgcgtttgatttcgcgactgattgtcgacttatggcagccgacttcttgagcgataacagtacgggaagttatgccggaatccagcattgcttgaatttgtccacgttgtacgctggttaattgatgatagtgcttagaaatgctagaatttgaattggtcataaagatcttcctttcttgatttttcgtcacttcaagtttaggtcttcatggcctttttgtttaacacttagtgttgcacttcaattttaaatccgggaaatcttttttcttaaaaataaaaatatgctactcaatttgaggtatactaaattagaagaagtaaagctaacagaaacaggtgaattccatgcatttaattgatgtaaccaataattactctgatttggttcacagtcagctcaacactaccgatgcaaactatgttaaagtttattctcttggtaatacttcagttatttatactgaaagtaaggattctatcggtattgcacttgaaaaccatgaccgtcgtgttcgcgaagatgagattgaattcgtaatcaagcgtttaattaaagattatgattcttcatacactttgactgtagacaagagtcgtcatgtaatcgaaattcacgttgacaagtaatccaaatattgttgtatcaaaaaaggaggattgattcattcaattctcctttttctttttgctttaaagtttttctgttaattcaacatctggatatttgtcatggaagaaacgttccgcaaattcattttcaaataagaataatggattaccataacggtccttaactaataagttacgagtattagacatgcgtgggtcaagctgttccggatcaatccagcgcgcaacacgatgaccaatactgttcatttcaacttcagaattatattcattcttcattctgaattggaacacttcaaactgcaattgaccaacagcaccaagaatatactcatccgtttgataattgcggtaaagctgaattgcaccttcttggactagctggttcatccccttatggaatgatttttgcttcatcacgttcttagcagttactcgcataaataattcaggtgtaaattctggtaatggtggataaacaatcttgcgcttaccagcataaatactgtcaccaatttgaaaattaccagtatcgtataagccaactatatcgccagctaccgcatcagaaacttgtactcgctcgcttgacatgaattcagtcgcattatttaaacgaattggcttatcagttctagctaaagttacgtccaagcctttcttgaattcaccagaaccgactctaacaaaggcgattcggtcacggtgatgaggattcatattagcctgaatcttgaagacaaagcctgaaaattctggatcttctggacttagctcctcatccccattaactgtgtgactctctggtgctggagccaaatcaacaaagctgttcaagaatgtctcaaccccaaaattggtcaaagctgagccaaagaagacaggagtttgatcacccatagcaatcttctcgcggtcaaacttgttcccagcttctttaatcaaatcaatttcatccagagtatcctggaattgaggatcttgactaagtggctcactatcaggcaacttaccatcttgatctaatggtaaaaagcgatcttgatcatttttgcggtaaagctcaacacgattattagcgatgtcatatagaccctttaaagtttgacctgaaccaattggccagtccattgctacaccctcgataccaagcaaatcttccaattccgcaattaaatctaatggtggacgtccatcacgatcaagcttgttcataaacgtgaaaattggaataccacgttgcttaacaaccttaaacaacttctttgtctgtggctcgatacctttagcagagtcaattaccatgacagctgagtcaacggccattaatgtacggtaagtatcttctgagaagtcctggtgtcctggcgtatccaaaatattgatacgtttgccttgatattcaaactgcataaccgaactagtaacagaaatcccacgcttcttttcgatttccatccagtcactagtagcaaaattgccagttttacgtgccttaaccgtacctgctttacgaattaccccaccaaacaaaagcatttgttcagtaatcgttgtcttacctgcatcggggtgagaaataattgcaaatgttcttctcttttttactttatctgctaactctttgtccattagtcctcgctatcttcttccttttttgattcatcaatcgttaataataccgtcaacaagcgtgaccccttcatccttctagtggtcaaagtcatcccatcaccaatatcaactgttaacttttctcccttagctggaatcacttttaaagtattgatcacatagcctgctatcgtatcaacatcttccatttgaagattagtaccaaattgctcattaaaatcatctaatggcatcttaccgtaaataatgtacttatttgtagctatttgattaaaaagaatctcagtgtgatcaacctcatcatcaatatcgcccacaatctcttcaaccaaatcttcaattgtagctaatccagttacaccgccatattcatctgtcaaaattgctaattgtcgttgcgtttgctgcatttccatcaacaaatcgcccagctcggcagtttctggtgcaaacagcggctcagtcatgacatctttatagtcaagattatcaaaacccttttgtttagcctttcgtaaaaccgttctgatatgaataatccctacaatcttatccttatcacgttgataaacgggaattctagaatatggctcacgaaggatttcatctagattgtcttgaaaactgacttctcgatcaaccatgaaagcatccgttctaggtaccattacttcacgggctgtcttaccctgaaagtccaaaataccttctagcattgaaaattctgtatcatcaattttatgactttcatgtaaagtaacaatttctttttctaaatgatctttagtccccacttttttatcgccggataatctattttttaagcgaccaaacagagttcccgctccaggatcactattcattttcgtactctctttcttaaaaaagttatctaaatatagctattatagcatagagccaataacaattatgttaaaatagcacataagactaggaggttcgtcatgaaaaaaagtcatgtcttactcgtttttacatttcttttgctaattccctatatctgtagcttagctattattggaatcggctataatgcattagttttacattcagctgaactttatcgcacattaatcggctcattagttggcgcaatcattatgtttgctgtcaaggctactattcaacggcctgttgatttattagctgttcaaaccaacgatggcttactgaagcagcttttacgtttcttcagtatcagacggcgctactggcttttagcagctaatattatcttagactttgttctttgctttgctgctacctacataatacgtgctcttttaacacttgatcaaatcgtaggcggctccatcggctttgttttgttaatcatgtttgtttcaacttgtcttggcgcttatgttgaatacgataacctgtcaatcgaccctgagcagcattaattacttgctggccttcaagtacattacttgggccagtttttttgtatccatgtcaagatcccaagtaatatatggcgtgtcactgtcacccaaattttcatgtacttcaattccgctagcaactacttttttggcaaaatttggcacggtactagtcaacggtaagttgaaaaagactaaagtttgattctcttctacttcctccgctacctctgcagctggtaattcaaacttcattaaacccgttggcacttcatcttttgctacatctgctaaaacgccataccaatacataaagctgtcctcacctgataccactaggacagaacgcttattttctaaattatgatcagctaaaaatttttgaaaagtttcatcattttccatttgctgattagcttccataaagctcttttgagcattcatcaaaccagctggaaatggacgaccaataaataatcttgattcaatatttttcttcattttttctcctaatattctactaattcgtctaaatcaattatttcaccgtttaaaaaggcatcaatctcacctgatgaaaaaccgtgactaaacaaatatttttttattttaaaattgcgttcaatttctggaagatttctaaaacgcttgtaagccttaattccttgtttcttcaaagcttctgtttgtgcattctcatcttctttaagatccattgcatcaataataacgttactaatcccgctatcaaagccatgcgttaataatttagtacgcatcttacgctctaattcacgttgtgaaatcttgccaacttgatggctcatcgacttaatcacgcgttggcccacttcgagccaatcttcttcatcaatttcatctaacttatcctgactaatttcaggatcaacgcctttttgcgtcaactttcgtaataaaattttagggccatcagagccaacacgcaaatcatttttgataaacagcttggcatattgacgatcatcaagatagcctaattcattcaattgactaacagcactattggctgcttcatcagagatttcgtgtttttttaaatattgcagcacctcaaagatggtccgaggctcgtaactcaaaaaatgagccgctaaatcactagccttagcatcagcatcaaattgcctaatcttttcaacctgctcatcatttaattctttacctttaagcagcacaaattctgccaacgttttctctccggcagaaaaagcatattttccatcaataaaaacattatagcgacctggccgtttttgtgcacttactttggttatgatcaacttgtttcacctcgcatatttttctacatccatgctagcaaattttgctaaagcttgctaagaactttttccaggtagtacaattaattgaacacaatttagtttttagtagaaagaattaacgatgaacagaaaatttacccataataaaccaaaacatgaaaaagacgtcatcatcactattaaacgtttaggaattaatggtgaaggaattggttactacaagaaaaagattatcttcattcctggtgccttgccagacgaagtagtagttgccaagattgttaaatcatatccacactacatccaaggcgaactggttagaattaaagaaaaaagtccagatcgcgtagacttccctgaaggtgttgatcccgagattggtggcttagaattagtgcacttgtcttacgacaaacaacttgaattcaagaagaacaatatgcttgaatcattacgcaagtaccatcctcgtaattacaataagtataaagttaaaaatactatcgctgctcctgacccatggcattatcgcaacaaggctcaatatcaaattgaaaaagatcatggtcaacttaagcttggactttttgctccaaattcccaccgcttgattgacttaccaaagatgccaactcaaagtgaagatacacaaaaaacggaacgtaaaatcaaggttttaattgaaaaattgcatgttcctgttgccaactatcgtcgtcatttacctggcattaagaccgtagttgtccgtcaatcagaagcaactaaggaaatccaggtaaccttgatttcgatcggccacaagattaagaacttaatccctcttgctaaagaaattatgaaacttgatcatgtagtttctgtctatcagaatgaaaccgaatggcagaatccacaagtttggggaaataaaaccgaaaagcttttgggcaagaatcaaatcaccgaagaaatcttaggtaaaaaattcgccttatcaccacgtgccttcttccaattgaacccagttcaaaccatcaatctttactcagaagcattgaaatacttagacctaacccccgatcaaaccttgattgatgcctatagtggtgttggtaccttaggtattttggcagctgaccgcgttaagcaagttgttggaatcgaaaccattccagaggcagtcaaagacgcacaacataatgtcgagcttaaccacatcaaaaacgctgattatattcaaggcagtgttgaaaaggttttgccagaattacaaaatagtggtgttgcaatcaatgctttaatcgtagacccaccaagaatgggcttagctaaaagcttgatcaaaaccctcttgcgggttaaacctgaaacttttgtctacatctcatgtaatccctcaaccttagctcaagacttagttttacttagcgaggcatatgatgttcgggtcatccaaaatgtagacatgttaccacaaaccccacgctgtgaggcaattgctaagttagtgctcagaaaagatagataaatccaacaacctagtcttgggctaggttgtttttgtatataaaaaagcggctactggacaatcctgtcccttagtagccgcaatttcaagtggatgaggtagctcatcaattgatagtcacgatttttagttgtttggtatgtatttaaacaatggcattatcgcaaccaatattaacattcacttgttcgggtctttacataaaatgtaacttttaataaattggagtttttgcgaacagccaatgataattaatcaaataatttttaattaagctatttatggctgacacctctacgtatagagaatctttcaagtttccaataataatacaattctggagataaaaacttacttatatttttttatagttgttaacttttatttctacctcttccacactattcattatatctagttgtgaaaccgtttacaagaactaacccatatatttttgcaaaaatctttctacttgttgtcgatattgctttggatacattggataagacaaagcatgccctgcaagtggcgcaagccaaatttgcttttgagcagctgttgccgcataattttgccagaccatcttagttggcacaaagtgatccttgccgccatgaataaataaaaatggtcgcgtatttttatttaactgagcaaccgcagaagcatcttttaaataaaagccatttttcactctattaattccactaaccaaatcaactattggaaaccgtggaaaagccttcatatgaaataaattttgagcttgatagttaatttcacctttcacggttgaataaccacaatcttcaataaaagctttcacttgtggtggcaaaagcataccgcttaccatcattgccgttgcaccacccatgctttgacccataattacaattttggcatttgtaccagtttgatcaattacttgatagatccaacgcaaaatatcatctttttcagcccagccatagccgatatacttaccttcgctgcgcccttgggcacgtgcgtctggaacgagaacattataaccaaaatcataaaacattttggcaaaaccagccatactatctccatcactcataaagccatgtaataaaattgcggttttttggcatgtttatcaaggtactgggcgaacaaagttatgccgctatcagtttttaaagtccatgttttcttagaaaaatctctaaaccaaaccttatcacgataaagtggatccttgcctgataattctttggagtcagcttttttattaaacggtgtcatcgccatcttgaaaaagtactcgcttgccgcaaacaagccagctccagcaattaatgcggaagacaataatagtttctttttcatcttttaacacttccaaattcaattatttcacttttcattttataattaaattgctgaaaatttacaatccttatgacttaattatactgaaaaatgcgcttaacagacttgcttcaattaatcgatgacctgaacctgaatactaaattttatctaaagcatgatgacaaactacttaagtggggaaaactcactattgccgaaggaaaatgtctgctgctacccgggcaaacagcaatgaccaaacaaaaattgattaaattagttggccgcatgcgtggtcgcggcatccccttgttaatggtcattgaccaaaaagaatattccattttcggcctacagattcgcgaagatactggacaagcaattttaatgtaaaaagtgtctgggaaaaaactaagtctcagatcatgaaaaaagaacgttgaatttttgtttcaacgctctttttgtatacttttagctccagccttgatattattaaatcatcacaaaataaaaaaggtggaaactaacatgtacaagaattatatcacaggtcaaactgctttaacacttaatctagattttgccattccggccaatcatttggctaatgtcatcagctggtttgtagattcaattccagaagatgttttagtaggcaagactgctaaaacgggccgcccagcctatcatccagccatgatgctcaaaatactgctttttgcttactccagaagagttttttctggcagaaagattgagttgatgctggaagaaaatctgccaatgatgatcttggctgaccagcaaaagatttcatatcatactatcaataattttagatcaagcagccatgccaatgaactgattaaaaagagctttatctacttcactaacctgttagaagatgaaggcttaatcaatgaaggtgctgcttttatcgatggtactaagattgaagctgatgctaaccgctatacatttgtctggcgcaaagcggttgaaaagtatcatgaaaagctgaaaggccaggcagttgaactttatgatgaattgattactaaagaagtagtcaaagaaatggaaaaagaaaaagttcaaactagtcaggggctaaaggaattagctcaagaaactgaagcagaaattaacaagctgactaaagagattgagcaggaaaacaaagccattcctggcggttcacctcgaaaagccaagcgacgtggactaaaaaagattctgcaccggctaagaaaagattatgtgccaagaatgcaaaaatatgaagaagccgaagagatctttgccggacgcaacagttattccaaaacagatcatgacgccacctttatgcatatgaaggaagaccacatgaaaaatggtcaattaaagcctggctacaatattcaagcagtcacgaccgatcaatatgtagttgattatgccatctttcctaatccgacagatttcaaaactttggagccggttttggatcaaatgaccgtgttggacaagtttgacaaaatcgtcgccgatgctggctatggcagtgaatacaattattcgatgctggaggaaaaatatccagacaagaagtactttattccctacactatgtatgaaaaagaacagaccaaaaagtataagaatgatccaactaagctaatcaactggtactacaatgaaaaagatgattattacattgatcatcatggcgtcagattcaatttcaaatattacagccagcgcaaggatcgttctactggtcaggtccgtgattttaaggtttatgaggcagacgagttccagctaacgccagaattggaacaattggctaaaacagctagcggccgccagcgccaagttcgctataatcctaactggcaatatttaaaagaaaaagcaaaagaagttctccaaagcgaagaaggcagacacatctatggcatgagaaaatatgatgtagagccagttttcggacatttgaagaacgtatttggcatgcgcagaacgcacctgcgaggtaaagagaaggtcgaaaccgatatcggaattgcctttatgatgatgaatttgaacaaatattgtcaaagaaggtggctgaagggccgatttttattgttaaaaattttaaagagaacaaaaaaacgatcaagattcttaaaaaaggaaatcttgatcgtttttattcatctggaagctagttttttcccagacactttcttattcttttacgcggtattgacgaatatgatccttagtaccagcaaaataccaagtacctacttcatcgtcgctagttaattctaagccatcctcaggatctaacaaagccgtattgaagacgtcttcatattgcttaactgtcagcttcttccgccgatcaagcattgcttgatcagctgtaggatcaacttgtttttcatatccttcaaccaacttgccactataaaactcagccattgcacctgaaccatatgaaaacaggccaattaatgagccagcaggtaattcaccattctctagcaaactaagtaaactcatataaagtgaagcggtgtagatattacctactcggcttgataattgtttagcagccgcaaaactacgctccaacttgatcattgttgcttgatcttgcccctcaatcgcaatattattagcttttaagcccatcttagtaaaaggtaaatgataagtaattgcatcaaaatcactagtctttaatcctttttgcttcttataatcagtaaaggtcttcttgaagaaatccaagtaaacttgagtcgaatacttgccgtcaactaaagcggtgcgagaataatttggtctccagaagtcgttaatatcttcgctgtaagctgaatgaccattatttagggctaaaatgcttgggtcagctttgatgagcattgccacgctaccggctccttgtgttacctcaccagcagtattaacaccatagcgagcaatatcactaccgatgacaattgcggtttgttcaggatgtacccgaacaaaatcacgtgccatcattaaggatgccgttaaaccaaagcaagcttcctttacttcaaaagttcttacttctggcttcaactttaaggctgtttttacaaataaagaagctgactttgattgatcaatactactttcagtcccaaaaattaatagaccaactttgttcttatcaatcttgtcaataaactttaaagtcgcattaattcccattgaaactgcatcttgcgtaatatccgcaacactcatctctctttgaccaatgccaactaaaaacttattttgatcttgctttcttgcgttcgccaaatcgaccatatcaacgtacttgtctggcgtaaaaagtccaatttgatcaatacctacttgcattatttttgctaaaagctccttagcatgactttcagaataatttttttcactaatcatcgcagctagtagctgcttgcgctcatgttcattatcggttaactcagcaaccacatttctcgcctgcagtttcatatgtcctgcttgaatgccaacagtagaaattgccagcaaagctgctaggttgttggctaaagccacgctaacaataatctcagctagagttttactcgtgattttttgtcctaaaatagcaaaactttgttggacgtcatgacgggccttaattgagccaccaactactccgatcgccattggcaacgttaattcgccaactaaataactaccctgcatcgtccactttgataaactgcgatattggccatcatgattggctaaaactgcagtggctgcttcaattgcccgataatcattgcctgtggcgattaagacggcgtcggctccattcatgattcccttattgttagttaccgcacgataaggatcgtcaattccaatttttcctaatagagcaacacgttgtgcaacttgcatcccaccaatcgtttgtggatcaatcttcactttagccgtggccaattggctaggataatttgataaaatcgcaaataatttttcatcaacaccagcataattttctaatttagccgctaaaaattccaaaatcgagttggttttattcgcgcccatcgcctcagctggatcaaccaatacttttaagtaaagcaaatcctctttctgcacagcagttatttttctagtaccaccaccatgacggactaagctggaaaacttttgattagctaattcgactaagtgcggaaattctttttctaattcaattaatgaaaaagaattgttgaccttcaaaacgatttgaccataaatcccttgtcggtcgctgctagctgtcacaccaccatttctagcaaagatactagctccatgattggcggcagcaactactgagggttcttcaacagccattggcacccaatatttttgtccattgactattaagttttgtactacgcctaaaggcaaacgcaactgccctacaacattttcactcaattcatctagacgtctcagaaccgcatcatcgatttgctctaatgcaataccttcatcctgcaataatttacgtctagcttcaggctctaattgataaaatttcattctgcattctcgatttcataagcaatcgcctgaccgccaccaatacacaaagtaaccagggcacgtctgccttttctcttctttaatccactaattgcactagcaactaagcgtgtacccgttgcacctaaaggatgacctaacgcgattgcgccacccataatattcaatttatcagttggaatttgtaagtcgcgagctaccgctacactttgggctgcaaaggcttcatttaattcgataatatcatagtcatcaaaattacgccccgtcttcttaagcagttttttaactgcataatatggagtataacccatcagtgcaggatcaaagccagcttccgcaaattcacctaacttggcaatttgcgttaagcctaactctttcattttctccttagttgccagaactaacatacttgcaccatcagtcaaaggagacgagtttccggcagtcacttcaccatccgccttaaaaacaggctttaagttactcaatgcctcaagcgttgtatccggacgaattggttcatcatgatctaaactttgaccatcaatctccacatccaggatctcattatcaaaaaatccggatttaactgctgcagctgcctttttatgcgactgcaatgcaaattcatccatatcctgacgactaacatgatatttttctgctacgttttcggcagtaattcccatatgcttgccagaaaaagcatccatcaaaccatcgttaagcatagtacttactaggtgatctgctggatcatttttgttttcttttttaacaaaataaggcgcattagtcatgctctcactaccgccgacagctactagatccaaatcgcctagttccatctgtccttgagctagacgtaaagctttcagacttgagccgcagacttcattaattgtaacggctgcagaagcttcactcatccctgaatgtaaggcaacttggcgagccatattctcacctaagccggtatccaaaacattccccataaacagtgcttgaacatcagctggcttaatattgcccgccttcattgttcctttcaaggccattacacccaaatcaattgcagaagcatccttaaaaaatcctcggtacttgccaaaaggtgttcttttagctgcaacaatataaatgtccttcatatattttctctccattctccataatgtgtattttttaacaaatatgataatagcaaaaaaatattaagaaaaacataaaaagactacgccgcagcgtagtctccctaataattaagcttattttttattttgcttaccttcagcttcaaacttcttgctcaattgcatgatatatgcccgcaattgttccttaatttctgggtgcttcaaaccatattcaattgaagtttcaaggtagccttctttgttaccaacatcatgacgttcgcctttaaaggcatgagcaaagacacgttgagtcttgttcattgtatcaatcgcatcagtcaattgaatttcaccgccacgacctggtttttggttagccaaaatatcaaaaatttcaggtgttaataagtaacgaccaataatggcataatcactaggtgctttatcaatatcaggcttttcaacgaatgacttaacattgatcagtcctggcatgatctcattttccggttcgatgacaccatacttagaaacttcttcatgtggcacaggcataactgcaattgtagaagcatgcgtcttgttatagcaatcgatcaattgcttggtcaatggcaccttatcttccattaagtcgtcgcccaacataactacaaatggttcatccccaacaaaactgcgagcacggaagatggcgtctcctaaacctgctggatgcggttgacgagtgtaatacaagttaacgcctaaatcagtaattccttcggttaggcgaagcaattcttttttacccttttcttccaaatcttgttctagttctggattagaatcaaagtgatcttcaattgggcgtttgttcttgccaattacaattaaaatatcttcgattcctgactttttagcctcttcaacgataaactgaattgttggtttatcaacgataggtaacatttccttaggtaaagccttagttgcaggtaaaaatctagtacccaaaccagctgatgggataacggcttttcttactttcataaaagcacactttctatttcaattttataagttcatcataacaaaatatgcatttttcagctacttagtttttcgtcttttcttttgaatataactggcaatacgaccagcagaatattcaacttgtccaacacggtttcgcacaatagcagcgttaacaccaacgccaaataaaaataatactgctgcaatattcaaccagagcataaagatgataaacgtaccaacaatgccataattctcccaagtaatcgggaaatggtgtaaatagaaactaaaaagaaatgatagggctaaccagcctacaacagttacaaaaactcctggccaaattactctctttttgagttttatattaggcaaaacatagttcaaataccataatgctagcatcataaccaatattaatactggatagcgataactaaagattttgctaatttcattaagtggtagctgaaaaatcggtcctaaaaagttgagtacttgttgcccaaaaaccaaggccaatgtagcaattgtaaatactagaatcatcaatcctgtaaaaacaaaagtaatagttctagtccaaagaaaattaagcattgataattttaattcaacttgatgaaccccataaagtctattttctccaagacgaattgcattaaccatatttgataatgaccaaactgcaaacacaataccaaaagaaatatagcctgttgatgtcgttttcaataaagaatttataattggcataatgaattttgacacttggtctggaaaaaccaagttcaaatattcagcaataggcgcagtatcaatgtgaaacaacggtaacacgttaccaatgataataataatcggaaaaatagaaaacaaaatgtagtaggcaataataattgaactagcaaatatctctccttgagataaggtggttcgtaatgtagaaataaattgcccaatttttaaaccaaaatggtttttaccatttttcatccattatcctaatcatccatctcatcaaagtgagggatgtacttttctaagccatcgtaaggatgctgcagggtcaagatcttaggaccatcttttgtaattgcaaaggtgtgttcaaattgagcagcattagaaccatctggagttgcgtagtaaacccaatcatcgttaggatcatcaacagtacgttggtcgatgtgccagtcgccaccagcttctaccataggttcacaagtaatagtcatgccttcacgcaagcgaagaccatgacctgccttgccccagtgaggaacttctggatcttcatgaattgatggttgaataccgtggccaattaattcacgtacatcaccgtaatgattttcatcttcaacataatgttggatagcagcaccgatatcaccaattctgttacctaaaacagcttggtcaattccgagatacattgcttttttggttacttcaattaatttcttatcagcttcggaaatttcgccaactggataagtagtacatgaatctgattcataaccgttcaagttgcaagttacatcaaccttaacgatatcgccttcctttaagatgcgatcttttcttggagtttggtgggcaatttcatcgttaaccgaaatacaagtaccatacttataaccctcaaaaccttgttctgaaaggcggccgccacgacttgatacgaagtcttgacaaaactcttcaattttccaggtagaaatgcctggcttaatcacatcacgtaagccttcaaacatagttgcaagaagatgtcctgaagcttgcatgcctttaagttcacgaattgatttaattgtaatcaaaataatttctcctttataaatttttatttagtttcagatatttctattataccgttttccaaaatacttttaaaaggtcgggtttttgtagaatcaaaacaaaactctagaaatacctgaaatatttttaaagtttgctaaaactaaacgtttttgcaatagtttcatgtataataaggtgtcgtataatgcagtgaaaggtatgaaaaatcatgaaagcaagaattgtttatgccagcatgactggtaacgatgaagacatggctgatattttagaagaagatcttcaagattatggctttgacgttgaaacaagtgatgtcggcttcactgatgccaatgactacttagatagtgatctttgcatttttatcacctacacctatggtgaaggcgtaatgactgatgaattggcagacttttatggggagttaaaagacttagatctaacaggcaaacattttgctgtgatgggttctggcgataagacctacggtgaacacttttgtgaaaatgtttttgactatgaaaaagcattcaaggattgcggcgcaactgaaattactaaacccgtaacaattgaaaatgcgccagatgatgatgcagtcgctgcaatcgatcaagctgcaaaggaaatggccgataagttaaatggctaataacaaaaaagacgtcacagctgttgatcaggcacaaatacgccgtctaggtcaaaaattaatcaagcgacaccgtaatctttgggtttacatggttttcggctttgtcgctgcattaatcaataccttagtcttcatggtcttacactcatggtggcataatgtgatggtaatttctaacaccatcgccttcatcgtctccaacctggcatctttctggtttaaccaaaaggctgtttttatcaataatgtcgatcatgaacacagcacgtggcataaactaatcgtctttttcacttatcgcgtcatcagtttaatccctgatacattaattatgttagtcggcttatcctggctgcatttaaacgcattactagtcaaaattatcgaccaaattttagtcggtgtattcaattacttaactactagatcagtctttcaaaagcaagaacatactatgattgaacgtgcaaaaatgcgcattcaagaaccaaaaaataaaagagacagcaaaaattaaacaatgtcattaagttaagacattgacaaattatcgacttggacttttaagatcattcatttgcgatttatcgcatttgaatgctcttttttcatgccaaataaacccaaatcttgtttagaaattaggctacacgatataaataatatacagctgatttgggtttgagatttcttttgtcttttcgtcctggtctgatcggaattgtgtaatgactaatttgaataagaatctttttaaagatttcagttgaagaagaaattatatacatagcctggatgacaaaacatgactgtttgaaattgatcgcatattgatacttgcattttttttgtggtacatatgcttgagcatcaatttgactgactgcgttaaacataatcatgtgggcatagatctccatttcaataaatctatcctgcttggaatgaaactgtacgctacctaaagcatatttcaactttttgaatgaagtttcaatgccccagcgcaaatggtagatttctttgatcctttttaagggataatcggctctatttagattagttagaacaacttcccattcttctttgcctgatttaggatcattaattctaaatttacaggcacgaaattttattgtacataactctccaaagtcccagctgccatctttggtatttttagaccgatattttatatattgacggtaatgatggttaaccaaatgaacgttttctgtagccttatgggtttcataataataattagaggtagtcacccagcaagctatatccttatcacactcttgattaggcaactcagctacttccttaaatgcgccatatcccgttttagtacgtatgacataataacagttaggcaggcgattacaattttcaatcatgttaaagccggtataacctcgatccatagtaactatatatggtccgcaatttagctttttaagcatttgaacggcggctttacgttcatccatctttgacttaggctgaaagatgcagtcttgataagtattatttaacaggtcatagagtgcattaacatgaatttggcaatatggctttcctttatgattgagatttccaacgatattctctgatttaggattccagatttgattaaaatcagacccatcaatggcaaatatacgatatttatgatcaaataactggatattaaataaattctgattaaatacagttagaatatgcttaaaacatgcgggtgaaagctgacctttgcgttggacataagcggaagtactgactactttatcgttatttttaatagctttttggccaaaagctctaaacaactcactggtcaaatcttttccttgcatattaatagtagttttaatgactgtagctgcatctaaaaaccgcttcctagtgaaggcatgaggatcatcgataaaatcatgaatatgctttccagtatcattgataatttgatcaagacgatctaaaatatttctgtgaagggctttcataattaacaccagctttctggcaataattttgaaggtttaataatttaatcagagggcgaaaaggtaggttcttttcgcctttattttatgcaaaaaaagaaccaaatcataatgattcggttctacagagattagattcaatttgtcaatgtcttaacttaatgacattgaaaaattaaaactgtctctttatttttttactcaaaatcttttggtttactttcactatcttgattaaagtaataataaatatcatccataattcgatcagctgcatgtccatctccatatggatttttggcattcgccatccgatcatattcgtttttgttttctaacaaagctagcatttcttcacgcaccttgtcgacttcagttccaactaacttcaaggtaccggcctttacgccttcaggacgttccgtcgtatcacgtaaaaccaaaactggtttacctaaactaggagcttcttcttgtacgccacctgaatcagtcatgataaagtatgaacgtttagctaagttatggaaatctaccacatcaagcggctcaatcaaatgaatccttggatcaccaccaagcacttcattagccactttttgtactcgtggagataagtgaaccggataaataatttctacatcaggatgcgaatcaattacttgccgcattactttaaatactcggcgcattggctcaccttgattttctcgacggtgcatagtaaccaaaatcaccttattaccaggagtaattgcgtccattacctcatgatgataatcttgttgtacagtctgtgctaaagcatcgattgccgtatttccagtaacgaaaataaaatcagaatggtgattttccttcagtaaattagccttactcaattcggtcggtgcaaaatataaatcggctaaatcatccgtcatctgccgattcatttcttcaggatatggtgaatacttattccaagttctcagacctgcctccacatgtcccaatgtagtttgctgataaaaagtagctaaagaagccgcaaaactagtcgtcgtatcgccgtgaaccaagacaatatctggtttctcttctttgatcaccttagataaatcaatcatcactttagaagtaatttcttctagagtttgattttggtgcataatattaaagtcataatctggtttaattttaaaaatatctagcacttggtccaacatttcgcggtgttgtgcgctaacgaccgttacttcttcaaaacgatcatctttttttagtttcaaaacaagtggtgccatcttgattgcctctggacgcgttccaaaaacagtcattaccttaattttcctcattaaaaaattcctccgcttaactattttactatacctgattttagactatcttgcacccgctttctgtgttttaatggaagtattaaattgaaagttggtcgatgcatgaattcatcattactattattaattacaactggtttaattattttgattggaactttttgccttgtttttggtatggacaaaaacagacccgctaaaactagaaaatatttactttatactgcactaatctgtgttttcctagtttggggcttaattactgcaattatgcttcaacccttaggataataaagataccttttggataaccaaagcatgtaaaaagcctgcaagaccaatacttgcaggcttatttctatgaccccggtgagattcgaactcacctctacggtttaggagaccattgttctatccagatgaactacggggtcaaacctaagattaactttaccaaaaaaagtggtaatagttaacctttttttagaattgtggattaaaaaatgttttcggatggttggtatcagcaatcttatcagctgctttaacaaaaggcatccaaattagcaaagtaacaatcatatttaaaatgcttaaaacaattgcacgccaatcataattgcaagccagaaatgggccaataactggtggcatgatgctaggtactgccacttgaactggattaaccaatcccataatgctaacccaataagaaaaggcaacattaactagtggcgctaatacaaatggaattagatacactggatttagcactacaggcaggcccaagagaattggttcgccaatgttaaaaattcctggagctagtgagattttggcaattgtgcgataatcactgcgtttagaaaacattaaaatcgccacaattagcattaaggttccaccagcaccgccaaaccaggcaaagacatcaaatgagccacgtacccatacatatggtggaatatttccattactaatcgctgtgatgttatcattttgagcagtcatccaaattgaatccaaaattggtgatagaacccctataccattaattccaaaaaaccaaaataactgcactaataaagtaatgacaattaccgtaccaaagccttgtccccactttactaatggagtttgaattgtggtaagcaaccaatttccaaaatatttaccggtaagaatttggaacaaataattaattccgcctacaccaaatattgcaatcattgcaggtaataaagaatcaaaagcagcttgttcagcatggggcaagttcgatgtcacatgcaacataatccttgctttatagcaagcataataaataaaaaagcctaatgagccaaacaaaatagcagtaaagaggccagtagttgagaactgactaatgtcaaatgcattatgcagtgtaacattatcaccatgaaatttaatcttagctatattggcaatgcttagtgcaaaagaagataatgccacaattgaagcagcaagtctatttccttcaaaagcttttgctagttgatagcctaaagccaatgctaagaaaaaggcaaataatgaaaatgttcctcgccaaactaaattactgattgctaccaatggctgtatcgcaaaagcaaaggcataccagcctaaatgatcatgagctgcttcaattaagctcttaattaaaactgctaatgatcctgccattgtaattggcattaatgagacaaatgcatcccgtaaagcaactagccatcttatctgaccccatctactagctagcggcaaaacatagtcctctagccatctaactaaacgaatcatttctttcctttcaagtaatgtggatgatatcccttgttcttattacgtttcttgcgttttttagttttatttttcttagtcgaagtcttaatgggctgctctttagcctgcttcttttccttcttgagtttaggcttttcagttgttaaatgatagcctgcaaagtagacacgctctatttgtaattgatctgccaataatttcttcaaatcacgaaaatcgtgatcatcgcctaaggtaaccacataaccttcagcgttcattcgacctgttcttcctgcccggtgcatgtaagtattagtctcgctcggaatatcaaaattaatcacataggtaaggcctggaatgtccaacccacgcgcagccaaatccgttgctagcagcaatttcgtcttaccagtagctaggtcatttaaggctttttcacggcgttctttaccaaattcattagctaataattcgaacttagtcttagtatgcccaaaaataccagcaaagcgcatcatcgttttatttgaatcaaagaacaaaattcccttaaagtgatccaacttagtcattcgctgcaaaaattcaatcttgtgttgattgtctacttgcaaaaaataatgtttagtcgctgaagcttgttcatttctgacatctactaacaagaaatgacggttaaaaacttgctccgcatcccgtgtaatctcagaatctgttgctccaaataataagatttgactgtctggacccagattttgccctaatgctgataacaattccattttagtaaattctaaaatatcatcggcttcatcaataatcaaagtcttgatctggtttactttaattcgaccacttgagaagaagtcaaaaaaacggcctggtgtagctacgaccacttcaggatgctttttcttcagattgtcttcttgtctctttctattgccagcaccaaccaagctgacgccttttaatcctaaagcgtggatgtaaggattaattgcatgacgaatttgtacagctaattcagtcgttggcgcaataattaccacgctgttagcattacctggctgtgctttttccaaactaggaagtgcataagccaatgtcttacccgtacctgtcttagccaatccaaccaggctcgcaccattgcgaatggcatcatagctttctttttgaattaaagttggctggtccttgtgttctctaattaaaacttgtttgattttttcttgatacattattactgtgttaattgcccatacttttgcttatattgaccaacggtcccgttatacgcgtacatcgttacctggctttctaagcctgaaacattccttacgcgtccgttagtagtgtagcaccaaaatgaatactttaatttattcggtgccttactatctgatgacataaataacgtttgcggattaaagtaatgttgatatttatgatcaactttcaccatgactcttttgccagctgcttgcaataaagccgcaaactgccccattgaccgcaaatatctcgctgaacgagtagtcactgccggtacaattagaattggcagcgagcccgtattttgtcctacttgcttaaaaaaagtagcggtaatgctgcatcggagtcgattcattgctataggaaatctcactaccaaatgccaagttcgttcctaaaatttggtcacgataagacagatagttttcatcaaaatatgatctgccttgggttgctttcaaatatataaaggaaacgccattagattgcaatttatgtaaatcaacatagtcaatatcttgatttaactcaatcccaatcgcacttgaattagcatctggcggtaaagttgtttgccgcttaaaattgaaaaagccaatcaaaagaaatgcaatcgccagaattaataaagtcaaaatcgctggcaaagtatacttatgctgaaatcttttcatcggctaaattcctcccttaattattttaaccgaaaagcctatcaatacaaaaatttccgagactgtaaaatagtttgtgtaaggatgaatgattccttaaatttatttctttaaacattagaaaaaggagttcctttctcgtatgattggtttgaacaaaaaaaacacatacagaaagaagaactccttcatgaatgattttaccaaagattttgctcaagctctattcaatccagacaaaataaatgatttattgcgcaaagagctacaacaggctgttaataacttgctagaagctgagttgactgcctttctaggctatgatccctatgccagaaatggctggaatactggcaattctagaaatggtgcttatttccgcaaggttgatacccagtttggaccaattgaagtgcaagtgcctcgagaccgcaacggtcagtttcatcagcacacgctgcctgactacaagcagcactctgatgttttggaaagcacgattatcaagctctactccaaaggcgtaactaccagagaaatcgctgacttgattgagaaaatgtatggcagtcattatagtccagctcaagtatcaaatatttccaagcagatgctccccaaggttgaggcttatcacaagcgcaagctaagcgacaagtttttctgtgtctatttggatgcgacataccttcctttgcgccgagaaacgtttgagcgtgaagcagtatatattgccattggcattaaacctaatggacataaggaagtcattgactactgcattgctcctagtgagaacattgaagtctggacagagatgcttcaaaacatgaagtccagaggcttgaagcaagttgaactctttctttctgatggtgttgttggcatgaaaacagccttggccaggacttatcctaaagctcattttcaacgctgcctggttcatgtcatgcgcaatatctgtgctaaagtccgggtggatgaccgcgaaaagatcatgaacgaattcaagcagatacatcaacagacaagcaaaaaagaagctgcagctgtcttgcacaaattctatgccagatggaataaagcttatagccatgtcatcaaaggtttgaaggaaattgagcccgatctgctggtcttctacaattatcccaaacaaatcagagcttcaatttattcaaccaatatgattgaatcctttaacaacgtcatcaagcgtaaagctaagcctaaggcagaatttccaactgaacagtcgcttgatgcatttattggcatccaggcaatgagctacaatgaccgctatttcaaccgaattcataaaggctttggtcaggttcaggataccttagaatcttattttgaataaataattaaaaaatcaatttacgagaaagaactatttacacaaaagatttgacagtttcaaatttccagtcgatgtgctaaaatttaaataatgtaaacgaagggcaacaaataaatatgaaacgacaaatctcatttggccaagcattggctaccgtagtcggttctgtcatcggagctggcgtatttttcaagatcggaacaattactgcacaaactggcagcacttcaatgaccctgtttgtatggattttagctgggatcatttcaattgcatcaggtttgaccatttcagaaattgccgccagcttaaaaattaatggtgccattaagtatcttgattacacttacggccgcgtgtggggttttctttttggctgggcacaaatgattgtttattttccagctcaaattggtgccctaagctcaatttttggcgttcagtttgtctccttatttggaattaaggcgaggtattctaacctaatagctatcttgctagtgctttttctcttaggaattaatctaatcggaactaaattttctagcaaaatgcagtcggtcatcactatcctaaaaatcattccaattgctttaattattatttggggattatttaatcctgccaaaatacctgcaccaattattccgttaacagtcggcactggacattcatttccaaccgccattagtcaagggttactttctgcgttattcgccttcgaaggctggattgtagtgactaatttggctaacgaagtcaaaaatccagaaaaagacctttcacgggcaattattttaggtctttcagcaattacattgatttatgttttaatcaattatactttcatgaccgttttacctattgatcaattaactaataacaataatgccgcgtttcaagcttcaatgaaattgtttggtcaatttggtggaaaactagtcactgtgggaattttaatttctgtttacggtgcggttaacgcattcatgctgacagggatgcgcacgccttatatcttggctcaagacaatttattgccattctccaataaaattggcaaggctaatatccataccggtgttccagtagttggcgcgtttattgttgatgctattgcaattgtcatgattctactaggtaattttactgttttaactgacatgctagtcttcgttatgtggactttcaacacaatgttgtcagttgccgtaataattttgagaaagcgtgagccagaattaaaacgtccatttaaggttccatggtatccgatcattccaattatttccgtgatcggtggtatcttcatcgttgtctcaacaattatcaatcaatttgttctttcaattattggtattggtttaacattgttaggactgccaatttactattacatgcaaaagaaaaataattaacgaaaaaagccgccgattttgggtgactttttatttgagtaaatatatttcctgaattgtcaaattaagtgcaacagttaggttatgaagagatatattgcttgaagagttcctctgctgtgtgatattggaggattcggcgatatttgtggttaatggcatcagttgcctgttgaacataagcttttgacttgtctttcatgctcttgctcttagggaagaattgacgcaaaagaccattgcagttctcattggtgcccctttcccatggagaatatgggtgagcaaagtaaatctggcagcccttgatcttggtcatatccgcaaactcagagccattgtcaaacgtgattgatttaaaccaggcaggatgtctgtcaatctccttttgaagcagcctttggcatgtgcttgcccgatagtcaggaatcttgataactacttcaaagcgtgtggttctttcagtcaaagtcattaaagcaggctgattcttgcgtctgacgcctttaaccagatctccttcccagtgcagcggagcttttctgtcttcaatctctttaggacgctgttcaatggaattgccaagatgcttcttgtgcaaagcgtgaccgccatggctgtgatgacgcttgttcctgcgtcttttgagcttcataggcagatcaatattgcttatgtccagcaagccctgatcaatatagcgatagacagttggtgtgctgggacaagggtagcctggcatagtccttttgaattcaccaacgaactcatcgatgctggtggcatcaaatttagctttaaagcgtctggagagcattctcaaaaagacagcataatgcttcaatggattgcgctgatagcagtttttgcgacgcttctcataataaatctgtgcagtatcagcgtaatagtgctcatacaataaatagctgctgtctctttgcaggacacttccgcgtttgatttcgcgactgattgtcgacttatggcagccgacttcttgagcgataacagtacgggaagttatgccggaatccagcattgcttgaatttgtccacgttgtacgctggttaattgatgatagtgcttagaaatgctagaatttgaattggtcataaagatcttcctttcttgatttttcgtcacttcaagtttaggtcttcatggcctttttgtttaacacttagtgttgcacttcaattttaaatccggggagtaaatatatttattaatgttgtgaagcaccgctagttgcatcattttcttgatgatcttcataggcagtattggcagcaattcgaccaaaagtgaaaatatctgccaaggagttaccacccaaacgattaccagcatgaatgccaccagcattttcaccagcagaatatagaccatcaataatttgaccatctttattcaaaacatgtgccttagtatcaattactaagccgcccatagtgtggtgaatagcaggttttctcggagtagcatagaatggtgcaacttcacatttgaggcctaatacattcttatggaagtctggatcctcgccacgatcaacgtaagaattataatcctggatagttttaaccaaaactgctggattcattccaatttgttttgccaaatcttcaagcgtatcagctctaaacaaggttccagccttaacttgcgcatcaagtgactcttgggttgtattgtaagcagtgtccttaatcttatcgtccgcaatttgataaatcaaaccaccattttcgataactgccttagccaaaacatcccgttccgcaaattcattaacaaacctcttaccctttttgttaaccataatatagttagcaggcggagttacaacaccagtgaaaagctcaccggtctttggatcagctactggcattaattggataaagcccataccgaataagtctgcaccagcttcaagacctaagttaatcccatcgccagtaattgcaggtgaattagttgttgtactatcgtactatcgtctgcaatgtttggccaataggtattgtatttttgaaccatcttagtattggcaccaaagccacctgccgttaaaattactgccttagcatgcacagtcaaagtactaccgtcagcgcgtgtcgcaattacaccgcgtactttgccatcttcaataattagtttttcaacacgagtttcaagatatggatcgacaccatgctctcttatccaatcacccaaaacgtgaataaaggcataacctaatggctctactggcttatgacctctgcgccacaaaccaccaactggttctgtaacttgagaattatcaaacttaacacccaaatcttggagccatttaacagaatttaaagcattagttaccaattcatgtaccaaagcatatttaccatgaatttcgttaccttttaaatcagtccttttaccacctaaacaagtttgaatttcatggagtaaagtcgaatcaaataaataatctgtaccagaatcaatatattctttgatttgtctttgtaatctttcaaaatcaaagcggtattctaaatcaatttgttcaattggcgtattagccaagtcttctaaagtctgtttttcaccaggaagagccttaaatttactttgccattctggttcagccgcattcattggaccaccagcacggctagtattaccaccgatctgtggatacttttcgagaacagccaccctttcaccatgttgaattgagcgaactgcagctgctagaccagcgccacctgcaccaactacagctacatcaacagtaatttcttcatcttctacctttgtagcagcgggcttttcacggtttttccattcggttgaatcgccgcctgcttcatcaattgcttcggctacgccatcaatcacaccatgactggaaatagtcgcgccactgaccgcatcaacgtttaaagtttgattttccacaattgttttaggcaaacgtctaaatacttcatcggctactcccttagtttcacctgatgaatctactttgattgaagtaactttatcgccatcaatgtcaacttccattggcattgattcggaaccatgacctttagcttttacttgatattttcctgacttcattgcttacacctctaataagtttaattttatccacaagttaatattagtgcgtcatctgttgatgtatcaaatatcaatttcactatactttcataataaaattgttatgagataactatgtttcgttctccaaataaaaaaagcttaatgcaaatagttatccacattaaactttttaattgcatgatttaattaataaactgaaacttgaaagctaagattaacgctccttccccgcgcctcttggctttttcttatcaaaaataaaaacgcaggatctctctgcgttatactttaagtgtcaacctgaaaagtaaaggagatcctacgcaatgaacagtatagaacaaatcgacacagaaaacgataccaaatccttaatttcttcatttattaatctaattggtctagctaagttgactaaacaagtcaactttaagcgtaaatctaccgtttcattaaccatgatattatctcttggctgatgtctgtacattttgctcggctttccttattcagagctaagagtgacaagcgtttttccgttagaactgctcgcaatgtacttaacgatggaagaatcaactggcaaaaactattatgcttgattgcagctcggctcattggctgcttcaaacatccgtaaaaagaaacattatctttattcaagcatagttgaggctcaatatcatggacatatctttttattaaagctcgtttttgtctccaaccgtggaaacaagaacaagtatttagttttagctactactcagacaaagcttagacctaaagaaatcatccaactttatggtcgtagatggcaaattgaaacatattttaagacgtataagcaatatcttgctttagataaatctcaagttcaaagctatgatggacaatgtggctatatcgcagttacagcaataacttatgatctattggcctggcaggaaagacaaaatacagatgataagacaatcggagatttattctatctaatgaacgaatccttacctgatattagattcgtagatgcattggtctacttaatttcagaattaaaagagcttaaacagaatagttttgaaaagatagatgaagtaatcaatgactttattaaccaactgccacgattcatacaaattgcactgaaacagatcatataaaaactaattacgtctagaaaagctcaatagtgacaggacttgagcttgattttggtgctttcaagtttcagtatttaaattaagcttcagaggcgcctgatacagcatctgcttcttgttcatttgaaacagtaaaataattataattggtattatccgcagcagtcgtacctgcaacaaaaccagaagcatagctccaagaattcatcatacttggcattgaatcatgaccattagcaccaccaacaatttctcctgcagcatagaagttacttacgggattcatatcattgtcaagaagctgcatttgatcagtagtttcatatccacccaaagttgtgcagaacagaagtttttgttcaattacataatatgtatcgccttcgaactcatgcataaacttcttgtctctaccaaactcaggatcataatctgctttaacatcttcagtatagttatccacagtttccttcagcgtttgataatcaatacctgctttttctgccacggtcttcaagtcgcctttgaccagaactggactcttctcgccaaccaaatcaaagaatgattgaacctcttccttggtaaagccatacttaagcattaattcatagaaacggtcccaggttctttgatccatgacaatgtaagctaccttacccttttgttcagcaatcgcatccctaaaatgcgtataaggtgcagattcgttaactattctcttaccatcagtattaacaaaaatagcccccatatcggtcgcttctttagttgaataagttgttagcttagcaataccaggttcaacttccaatccatgtggatataccttataccagtctaagttacgagtaaccaaattcatatttttggcaaaatcaagataatcaccagttgaagtcattggaccataatatggaatatcagtcttatgagcctgataatcacgtgcaccccaaccaccagcagctaaaacaagtgacttgaaattgacattaattgtctggtgcttgccttcagcggttaaagataccagtttgccagccttatctttattcaacttttcaacacgggcatctaagataatttgtccgccctttttttcaaatgcctcagccaccttagtcactagttcatatgagctttcactaggcatttcaatttgacgatatacactatgttcaactgtttgggtttccgctttttgataagtcaaatttgcaaattcagtaataaagtctactgccttcccaatattgttagctaatagctttgacaacattggataattagtaccgcggcattcacgagtaatatcttgaactagtctatttggcgaatccttctttgccgtttcaccaaataattctgcagaaactttagagccagttcctacaacatttgagccatttaaaatagttgctccacctaaatagccatttttttcaagtacaactacttttttacccatcgaaagagcacgacttgccgccattaacccggccataccggagccaattacagccacatcaacatttagttgcctttcttcatgtacgacttctggcttttttccgtcaagagcaatgttattttcggctaatgcttttttaccagaatctagcattgcttgagtcatcaatgatgccccagaaacagcgtccacgtcaaaactttgattatcaataatatttttctttaatttaccaaaagtttgattaaaaattgcaggagtttccgaattcttggttactttgacatcactaattttattgttttctaagtcaatctcaaaatcaatttgaccattgcgaccatctgcttgagctttaatagtttgtttggtcataaaaactactcctttacttgttctttttactaaaccgcttatattataaccacaatattaaatctaaaaaataaatttaatttgatattttaatagaatttttttatcaaaagcagtaaataaaagcgagtgatcattctcactcgcttgattctttatctaattttcatccttatttattagcgtaatgttgaataacttctggcttcaataccccaacataaggaaggttacgatacatatttaaaaagtccaaaccataacccactacgaattcattgccaacctttgaaccataatattctaattcaacatcggtagttcttctggcttccttatttagcattgcacaacacttaacgctcttagcgccacgtgccataatgtgttctttcatgaatttcaaagttaaacccgtatcaacgatatcttcgacaattaaaacatcgcgatccttcacgtcagttaccaaatctgatactatcttgaccttaccagttgactcaaagccatcaccataactagaaacatcgagaaaatccagttgatgtgctacgtccatttgtcgagttaagtcagtcaagaagtaaattgcacccttcaaagccccaacaactaccggctttttaccagcatagtcctcagttaattgcttacctaaacggacgcacatctcatgaatgtcatcttctgtgaataatttgtgatctataatttggtcaatattgtcgccttttgccatttaatctacccttcaattcaatttacatatattattcctaataaaaagaattataacatctttaaacaaaaaaagcgtcattttcaacgcttcctctgaataatttctaattttcatcctttgattgatcgtctttttgatctttatccttaatcggttcaacgataaaccagcgcataaagccttgttcgatactgtctaaggtaaacttatatccttcaagttcaattgattcaccctttttcaagttaggataatgttccatcatgtaaccaccaatggtaataatatcgctatcttgaaaggccttcagatctgtatggaagaaacgctcaaagtcatataaagtcgtcttacctgaaacatgaacttgaccatccttgtccttgataatgtaatcatctgaaacatcatcaatttcatccttaacagaaccgaaaagctcttcataaatatccttatcagtaacgatcccactagtaccaccatattcgtcaactactaagacaattggtgtgtgcttagaaatcatcaagtgcaagatatcttgaattggcattgattcaggtaccgtgataatagttctaataattcttgttactggtacgttgccatcaatttggctttgttgcacaatgtcgtacgcataaacataacccacaacgtcatctttatcattatcacgcacaactggaaaacgactgtagccttcttccaagtattttttcaaggcataggcaattgtatcagttgaatcaagtactgacaatcttgttctgtcagtcatgatgtccttagcaaccttatcgtttaattcgaaagctctttccatataagttaagtcttctttatcaagcgaaccaccatgaaccgcattacgcgacaacttgatgatttcagattgtgaataaacttcattttcttcatcagctggagtaaagcccatcaattttaagattccattggagctagtatttaatagccaaacgaatggataaacaatcgtatggaaaatatgaagtggcgtaacgatccccatcatcatcggtactggcttgtcaatcgcaatattcttaggcacaacttcagttaagacaacttccaaataagttaataaaactacgcctaagattgcactaactgacttgatgagtgaatcattcattggcgtcaaatggaaaagatcttccaagatggttgcgaatgtatcagccgagaaccaacccaagactacaccaaccaaagtggtaccaacctgagtagttgacaaatactcattcaagttgtgcgtcatatgcaaagcacgacgcaactttttcttatttccttgacccttagcaagcatatcttcgagctgacttggtctagtttgaactaacgcaaattccgcagcaacaaagaatgatgcaacgataaatattaataatgttgcaactaaattagttactatttgagctggactcaaagtattatcacctttttttacaaatatattactaaaacctattttaccatttcttgcctaaaatagtgcagttttacacaagggataacggttttttgtaatttattcgaccaccttgtaaatttcattaaacggtacacgctttggaataaatttaggatcattaattttagcattcttgtcgatatagccaactgcaattgccattccgacagcttcatcatctggaatttgggcatattctctaaccaattctgggtatgaaaccattgagtgagctggcatcacacctaagccacggttaatggctaaaagcatgatactttgtgcaaaaattcctaagtcaaaaacggaccaagctggagatttctttggaaccgttaaaaagataattgctggtgcattgaacattgttttattcgcatcattaaataattgaagcttatttctgaaaaagaaactttgggatgcacccatcgtagccatattacgacttggataagtatcccagtctagtgatagcattgaagcaaaatcttcatgtgcagcttctttatcatcaatctttttagctgaagcagccttaaacttgcttaaagcatcccccatcaaaacatatgcacgccatggctgagaattaagcaatgaaggtgattgctgtgccattttaacgattccagcaattgttttttcttgtaattttctattagtaaacttccgcgttacatgttccttttcataaacatccttaaaattcatttttcctcaattcctttttgcttatataataacaatctatattttattatagtaaaaaactgttaaaaagcttaattattgctcttttcttgctttttcttttctgctgcctgtttttttaaataagcactcattgcaagatcattttttcgcatagcaataaacgcagtaatggttaaagttaatccgccaagacaaatcacaagtaagccaatcggaaacaagaagtctgctcccttaggaataaatgatgccttaattacccagcatgctataccaattaacatcaaaactatacccacaatgactgccttagtgttcggtcgatatcttttcataaatgcccttctttcttaattaacattctaacagaaaaagcttagcttcaacgtagaagctaagccgaaaactagagaaatagtcgttaaatttttacatgagagaggggaaagttgactatttaagttcgatagtttgtactttttgggaatgttcaacactgcctttttcaatcggagtaactgacttaatcaggtccatgttggtgtagacaacgatgcagctgtcatcgtatcccttgtctgtaatcatttggaaatccattgtggctaaggggtgacctttcttaactttatcgccttgactaacattcactgtaaacggagcaccttttagttcaacagtatcaagacccaagtgaatcaaaaactcaataccttggtcattcgtgataccaatagcatgtttagttgggaagagtgtagaaatactaccatcaactggtgcatagatatgattatccttaggcttgatagcatagccatcacctaacatcttagttgagaagacatcgtcttttacatcagtaattggcataatgtcgccgtcaactaccgcatctacttcaatacccttattctttttcttaaagaaattaaacataattaataacctctggatttctaaaattcaagtaataatatcaacataaagcttgcgagtaataaaccagctgcagtaagtgaaattgcgattattactcgactaacgccatcttgtgtcttcttcaaagctcttgctcgataaaaacctaagatagctaatactacgcaaagcaagttgccaacaaagagctgagcaatcatctgacttcccatcaagaagcgataagtctgtcgattgattaaaaactgcttgtggtttaacaacatatagtagcctagtatgaagtcaacgatagcaacgattgtactaatcgcaatcatcggctgcttcataatcatcatccgaatcgattgaccagaagcaccgcttcgtagtgcaatcatcgcccaaaacaatagtggagcaatgaaaagtacgtatgaataccaagtcaaaatcttcttagtatccaagtgcatgctttcggttattcgatcgataaagttgccaacttttcgtttactaattgcccacattgatctctacatcctctccttgactctgttgccaagctacatattcactaattaccaaatcaattaagaagtacgctggggtaaaggcaaccttcccgctcttaaagtcggcatcatcagtaaaggcaatcgttggaaaataaatgttgtgctgcactaatgaagctaatttattttgcttcaggttagtgaacgaaacatatttgaatttatcattcactagttccaacttagtgatttcctcattgatcgttttattatcacccgtaaacgagataataaacaaaacatcgcctttttgagcaaagcgtcccgcagcttttaactcctctaatgctgatggcaaaacagttgcatgcttgccaactacaaacaattcatgagccaaatattgtgcgattaactcttgttgccaaccagtagagtaaatgtaaattgtccctgcattatctaaatcgcgatacaagctattgaaatcacgttgtttgaaatacttcaacacgtctgaatttactttactaagttcccgcgcaaaattattttcaattttgattggtttttgcttcgattcggctaattcgaccaaatcaaatttaagctcactgtagccacttagtcctagctttttacataaccggaaaattgcggattcggatacataaagctttttagctaatttggctaagcttaatttgctacagtctctcggattatttagaacatattgaactatctgtttttcagaatcattcaacttatgactattgtcatagaccattgatctcaaatttgccataatacctgtgcccttatcaatatataatttatatattaatgataacacaaacgctttcagattatagcaattgtttcatttgatcaacaacttgatcggcatccaatccgacaacgatgtcaacctcgttgttatctttatgttgtacttcgtaagaatctgcgatcttcttgaattctgaatctggagcgaccttcttaggatcaacgacatgagttcttactctagttgagcaagcaatgacatcttgaatgttggagtcaccaccaagcaagtcaacgataccagtagctctttcaatataaggattatcttgttcagttgataccttagcgtcgccaccttgttgttgcattaaagtgttcatttcatcaagaacttgaggtacgtccaaacctacgataacttggatagccttaccgtggtgtacgacattgacagccttgtttgctttaaatgcggcatctgaagcaactttatttggatcggcaacagatacacgtaatctagtagcacatgaactcaattctgtaatgtttgaaggaccacctaataattcaaggtaagcagttgctctttcaatgtaagggtcattagcgtccttaccagcagcttctgcagccttcttagccttgtattctttctttgaaagaaggtgaacatcttgatcatcggcttcacgacctggagtaatgtaattgaacttctcgatcatgatcttgaagacaaagtaagtaataataccgaagataataccaacgataaattccatcacataggtcttccagtggttttgccaaagtggaatccagttcattgaagcgataccgatcgcaccatctgacatgaatcctcttaaaccaaaggcccacataactgtgttcatcgtggctgacaatactgagtaaactacccaaagaactggagcagcaaacaaataagtaaagtcgataggttcagtaataccagctaatactgaggttaaagcagctgggataagcaaagctgaagtttgcttcttcttgttcttcttagcagttgcgtagaaggcaagacagataaatggtactaagaataccttttcgttaccgtaaagttggaatccttcaactgaagcgatttgtgaaagtggtttagtacttgcagcgtattcagcaaggtgtttcaaccagtatggttgcaaaccgccggcaacaacggctggaccgaattggaatggaatgtataccaagtggtgaagaccagtaggaatcaatacacggttcaagaattggtaaatccaaacaccgataaatccactatctacgatgaagtgttgcatgctggtgatacccatttgaacttttggccagccccagcaggtaatgagtgctaaaggaatcattacgaagaatgctaaagcgtagacataagttgaaccttggaaagtaccaagccagtctggcaacttcttatcaaagtacttattgtgtaaccacactacaataagagcaacaaccaaggcacctaagatactagtgtcaagagtcttgataccagcaatgttagttaaaccatggttagtagcgttagcaacaatttggatcttgtcaaagttaggaataccaaaagctgcaccccagtgggtaagcattgcaccgatgaagtagttgtaagtcaagtaagcaataactgcttccatggctgctctacctctagccttgttggctaaaccgattggcaaacctacagtaaacaaaataccttcttggttgaacactgtccaaccaccagctgaaattgtgtcccaaactgagttccatgtagttcccgggttggcaattgaaccaaacagagtcgggttattgaacaaactacctaaagctacgacaatacccgcaaacgagaacagcataactgggacgaacatagcggccccaaaccgctgtattttctgcatcataatcgtttacctctgaagaaaaaaattaaatcaataacttattcttacatctacacctgcatctacatctttatttcatcagatcaagtcaaccgcaaggtgctcatacaattgacttttgccatttgtgcttcacacaaatatttactcctcaaaaatgttttaagataaaacgtccagttgatatcaaattctgaacttaactctatcttagtagctagcttacatttttatttataccatagttttaagccaatgtaagcgttttttaaaactatgacttattgtttcataaagttaagatgatatttcatttcatgaaatttatttcagcccttcaatgatgtatataccaatatttatacccctttattttgcttgtcgcgcctatgtttaatcatttactttacatacaaaaataacatgttaataaatatgctatagacattctctatttatacacataaaatcctctgcaatatatttcatttcatgaaacgaaacaagtgataaaacctttttcctttccaagatgaactactttgcttactgaaataacacaaagtctggcataattaacggtaagttaaatgcacaggaggaattattatgacaatcaaatttattgcacttgataccgacggtaccttgcttaattcaacaggtaagattttgcccagtacaaaaaaggcagttaaaacagctttagaccaaggaataaaagttgctttatgttctggtcggccagtcgcaggattaaaacattttatggacgaattaggaattattggacctaatcaatatgctatcactcttaatggcgcaattacccgcacagcagatggcaagataatgactaaagatctagtttctaatcgactttatcgtaaaatgtatgcttttgctaacgagcatcatttaccttttaacgttgtttcccctgattcaaaaataattacaggagatcatgatgttgatttaatggtttatactcaagcttacgaaaatagtgcgactttataagatgaattgcctagtgattttgaaattgctaaaggttgttttgccactaaagctaagttgttagaccaatgggaggataaaattcgccaagaatttgggcaagagctgtatattgttcgtgccgacgattgcttcttagagctacttcaccctaatgttaataaaggaaccggattaaaagaattaactgaaaaacttggcattactccagaagaggtcatggcaattggagacgaaagaaatgatattaccatgtttgactttgctggaacagctgtttgcatgggtaatggctccgaagaagcgaaaaagcatgctgattatgttaccacttcaaatgacgaagatggcatcagcaatgcttttgagaaatttttatgaacaacctaaaacaagtatctgagaagtgattaatctttcctagatacttgttttattatttgttcaaatattcacgcaaagctggcaaaactttctccgcctcaactcgtccgacctcatacactcgtcgcatctcttttttatctgtttctaaagtgccaatttcaagcggaaacggtggacgaataataaaagcttggtcagcagcttcatcttttaccatctgatcaagcaccgcattataatcctcagctctagtagccaatttttttactactgcggggtatttccttaaaattactttttccagtggatagagcttactctgctttttgcgataagacttcggctgtgtagcaatgactacctttttatcacagttttgctgctctaaaaaatcatacggaattgaatcagatacaccgccatcaaagtaataatgcccatgaattgcaactggatgagcaaaaaatggaatcgacgacgaggctctaatccactctaagtcaacataacctgcatcatgtaattgatgataaaccggctcacctgttgcagcatcagttgcaacacaccaaaagtccattggattagtcataaatttttctttatcaaaaacatccaacttatcaggcaaaatatggtaacaaaagttagccgcatacaaattgcctgaccgccgccataatttccaactagcataatatggtttccccgcaaagcgcatgttgtagcgcaatactcttcccttttgctccgacttcaagtttacgccaaaggcagcaccggctgaaacgccaattgctaaatcaaaggttatgtcattttctaaaaacacatcaattacgccagctgtaaacagcccacgcattgctccaccttcaagtactaacccacttttcatattttccctctttatcaaaaaaagacctacgcttttcgcataggtctaatttattcttattttaattttacttcaagcccgaccattgccattcagttacttctggcatatccttaccattgtcacgaatgtattgatggtgcttttcaagcaagtcatccatgtgactgatgaagtccgcattcttgccctttagcttatcgatgctttcaaccgcatccttagccaaatcgaagcggtcaaggtggttcaagacacgcatatcaaatggagtagtgatatcaccattttcttcatagcagtgaatatgaacattgtagcgcttgcgagcaaaccagatggattccatcatgctcttgtagccatgccatgcaaagattactggcacatccttagggaataatctgtcaaattcttcagttgaaagaccattcttgttgtcctttggatccattaacttcataacatcaactacgttaatgtagcgaatcttgagatttgggaacttcttatgcaaaatatcaattgcggccaaagtttcaatagttggctcagtttcagttgaagcaaagacaacgtctggcttaacgcccttgtcagttgaagcccaatcaatgtagcctaagcccttgtctaccaacttcttggcttcttcaattgagaaccattgtggacgaggctgcttagaagttaccaagacattgatgcattctctgtcttgcagtgccttgtcgcccactgccaaaagcgtattagtgtctgatggcaagtattcatgaacaagatctggacggttcttttcatacaagtgagtcaagatgcctggatcttggtgagtgtaaccattgtggtcttgttggaatacagttgaagttgcgacaaagttaagtgatggataatcatgacgccagtattgttccttagcttttcttaaccacttcatgtgttgcgtgagcatggagtcaactactcggccaaaggcttcataagtagcgaagaagccatgacgaccagtcaaaacatagccttcaaggaagccctcatcttggtgttctgacaattgtgagtcaatcacacggccacttggagccaggttttcatcatttggttcatgaacttctggttcccattggcgcttttgatcatcaagcaattggaacaagcggtttgatttagattcatctggaccaaagccgcggaaagtagttgggttgagcttagcaacttcatccaagtacttagcccattcaaccatgtcttgggcttcaactgaacctggcttgtcaaacttcaaagcaaacttgcggtagtctggcaagttcaagcgcttaggatcaattcccccattagtaattgggttcattgccattctatggtcgcccttggcagtgttttcagtcacgatttccttaggtgaaccgtcttcattaaacaattcttccggcttgtagctttccagccaatcagtaagcatatcagcgtgttccatgtcatcttgagcaactggaattggaatttggtgggcacggaagctgttttcaattgggttgccatccaagtccttctttggaccagtccagcccttagggcattggaaaataatcattggccaatgtggcaaggtagcatcattgttttcacgggcatgcttttgaatagccttaatttcttcaatgacttcatccatggtcttagccatttcttcatgaacctgcattgggtccttttcaccgtcaaaacggccacccttaaagactgaaacaaagtgaggatcccagcccatgccacggaagtattcggttaattcttgatcgctcatgcgagaaacaatggttgggttagaaatcttaaagccgttgatttgcaagattggcagaactgcaccatctttaattgggttaatgaacttgtcactaaaccatgaagcagctaagggaccagtttcagcttcaccatcaccaatttcaacagcggcaataacatctggattatccaaaacagcaccagtaccgtgtgaaagtgagtagcctaattccccaccttcatgaattgaacctggagtttcaggagcagcgtgagaagcaacaccgcctgggaaactgaagcgtttgaatagcttagccatccccttttcgtcctgggtaatctctgggtaacgttcagtatatgaaccatcaagatatgagttagaaaccattacctgaccaccgtgacctgaaccctcaatatagaacatgttcaagtcatacttcttaagcacacgattcaagtgagcataaataaagttctgtggtgcaatagtgccccagtgaccaattggcttaggcttaacgtcttctgcaaccaatggggtcttaagaagagggttcttcatcaagaacaactgaccaactgacaagtagttggctgcgcgccaataagcatcaacgctctttaaatagtcttttgagtcataatcaactgccatcttattctcctttgagcatctaagagtgctctttttcatttgttcttttgtttacacttatatcataccaaattatctaaaaagttcaactatttttataattggatcctaccaattaaaaaataagtatttaatttaaaattgcatcccttttttgttgctatatcaaccttttaatgctttgatataagtatttagttgcttaaatactgataagtacagataaacaaatatcaaatactgacataatcagtgcaaaattattcattcatgttagattactaaatggagggcatgagatgacccaagaagaaagattaatacaaattaaacaattacttaaaaaaaagcaccaattatcaactagacagattgcagctcacttcaatgtatcatttgatacggcaagacgagatgtaattcatctaactgaaactggtcaagcaattagagttcatggtggtttgatggaatttaattgcaacagcgtacctgattttttagcaagaaatcaagtacaatcaccggttaagatgaaaatggctagaatggcaaagagatttgttcatccaggtcaatgtgatttcatcggttcatcaactacgttaaagcagctctgtccaatgcttaatggtattgacatgcagatcgtcacgaattcaatcgacaacgcattaagcttattagcaatagaaatcccatcagtcagattgttgggcggcgttatcaacaaaaagcagcgtttcatttattctgaaacagcattagaaacattgcgtcaaatccatttcaatactgcatttattggtggatctcgaatcagagatgacggcgtatatacaccaagcatggctgattccaaaattgtcgaaaccgccgctagtcgcgctaatcaagttgtattagttgccgaaaaatataaatttactaatcaatcctcttcgccatacatgtctgtccccctcaatcagatcgatgtccttattaccgacaccccattgcctgaggaattaaagcatcattttaatccaaaaacgcaaattatacctgttttaaaggagtgatagttatgttcagtctctttaaccaaaagaaacaaagcgaaagtcgtgaagtataccaagatttgaagaatttttataatagtttttttagcaatatctacaatgaaatgaatattggtcgctatcgacagattcgcgatgcaattgggcttgttcttaataagttcgacagtggtgatcatcctcttgaatacactagcaaattggtcatgtatattcaggctcgaattgccatgaatcacctgcatctaactcatgaacagcaagacctaatgaaaaagctaagtgacgctaccaaatatgtaaatctttcttatgtttatctgagtccgctcacttcggtagaacaatttgttaatatttaagtgtatctagaacctgctctagatgaaaaaatgaatccaaaaagaccgagtagctgatctgctcggcctttttatgcaataatattgttaaaagatatagatttttttcaaaggaaataattatgacaaaattaccattcaaagttgttgctgtcgatatggatggcactttcatgcatgatgatcaaactttcgatcacaagcgctttgaccgcatcttaacagaattacacaaaaaggggattcactttatcgtttcaagtgggcgcccttataccagattacgcaaagattttgctggctttttaaaccgaatcgacatgattgctgacaatggctcgcttttgcttcaagataatcaaattattagcactcatttgctcacttataaaacaaccttagatctaataagttttatcaaagagcattattccaagagttcaattattgtcactgggatcaacaattcatatacaactattaatgcttctcctagttttaagcagacgatgaacttctattaccccgatcgaattgaagttactgatttagcagcggctatcaatccgcaggatatgattactaaaatcaccttaagttatcaatatgatttttccgcggaattagaaaaagaattcaaccaaacccatgccgagaagattcactgtacttctagtggtttcggtttgcttgatattgtgccttacagcgttaataaagggagcgctctaaaatacttcttacgctattttggtgctaaacccaatgaattaattgcctttggcgacggaatgaatgatgctgagatgttaaaactagccggttacagttatgcgatggctaatgcagaagatcaagttaagaaaatcgccaagtatgaggccccgagtaacaatgatgatggggttttagaggtgcttgattcatatttagctaaagtagagaaataataattactgtaaactaaaaccgtctgaatgagcaaaataaaaaagtagccaagttttcttaaactaattgacttaagaaaacacagctactttttatttacccaaattaacaaaggtattaaagttcatataatgataatgcacgcgcatatttgatacttcaaacggcgtcccatcatccaagaagaagatcccttccattacaccaacaggttcagtcggcttcaaatttagcttctgctgatcttcttcattcgatggttcaacagtgatattcaagaatgacttagtaacggtctttccctgttcatcttccaaatagttaaacaaagacttttgtaaagtttctggctttaattccggcacaattttaatcggcaaatatccagtctcaattaaaaatggttgttcatctaacagtcgcagacgcttgaattcataaacaaaatcattttcatttaaaaataagtcttccgcaatttctttagttgccttaatcacatgaaaatcaagcaacttaatttgttgttttttaccagggactttaaaagaatcagtgattccaagattcgatccatcataacgaaacattgcctgattgcgcaaatatagtggattaataaaagttccactacctcgctttttaaaaacgatcccttgttgagccaacagctccagcgcacgcttcattgatgatcgacttacctgatagtgttcggctagactgcgttcatcaggcagtcgcatcccctcatactgattattcaaaatattctgtttaatgtcatgcataactgtccgataaacataatctgccattattctcgtccttgatttgcctttttaatactatcaataaaccaagttgcaaacttatccaagtccacatctgtcgcaatctccgcattggcatgttcttggtccataaaatccattacgctggcaccataagtatattgcccgcgcaattcaatattcacgtttgcctttttcattgtaaacatttccggatgaagcataattccaactgcagtcggatcataaatcttaattcgcggatcaccgtctggttcatgaatgttagagaaaagtgaatacaacatattacccacttcaccacatgtcttaactttatccatttgctctggtgttaaatgggccttatttccaatttcaagtggagcaaccttaactggcaatccactataaaaaactacctgcgctgcttccggatctcccgcaatattatattccgcaaatgggctatgatttccgtgaccaatattaccacccataattacaatttccgcaatattttctttaacttcaggatattgcttaaaaagtaaggcaaagtcagttaatggtccaatgcccatcaaagttattttttctggactacttttaatttccttagccatcaacgttgcagcaagaccaggttcaattaaagaatcatcagcttgttcaaattcaaagccggcaatccctgttttaccatgaaccgaagcagcactaatcattggtgccaccagtggttgatcagcacccactacgacaggaaccttagtatgcaaaaacttttctaaatttaaggtattttgcaaggtatatttcagtgccacgttaccccaagtaggcacaatcatgcgcacatcaagttcttgtgcaaaaagactaatcgtcatggcagcaatgtcatcaatgccaggatcagtactgataattaaaggtttcttgttcataaaattatcctctcgtattaagtacttttataatagcaaaaaaccaaccaattaagaaagtggttggttttattctaataattatttttcttttttgggtttaatacgttgaatgtgttcttcttcatggtcacctaatactaatggcacacgctcaaccacagtatcggcatactccagtccgaaccaagatgcagggttagaagataaattctgcagccatactcttgcttcaaccatgaacttttcatagcctgtcaatttagttaatggactaattacgtcgttaacaattacaaaggcgaagtcccctacatcacgacccggtgtagtagtgaattgttgtggttgagcttcaatcgttccatcagcgatcaaatcatgaacaatttgccgcaaataaacatttacactggtttgttttctaaaacctaaatacaactgaacgttaattacattcttagtaccataagtattgaccgcgtattctgcagtatatggctcgttagtaacattaacagttacaaaccagtaagccttagcccgtttaggtctcttatccaaaattgaataaagcatttcgcgcttaatgaatttattatacttaaccttagccatataaactacattcgtagcgtaaactggataatcatcacagtggctcaactcagtcaacatatctgtatattcatctaagcgaacataagcattctgctcctcacgcttatcacggatcttattgccatagaaccacacgtacatgattgccaaaataaaaccagcaattaaaacagtgacgtaaccgccatgcaaaaacttagttaagcttgagaataagaacatcccttcaataaaggcaaagactactaagaaaatgcatcgtattgatagcgcggtaccttttttacccagatattcaaataataagatagttgtcatcaacatggtaaccgtgatggccagaccatatgctgcttccatatgatgtgaagttctaaataagaaaacaattgcaactgtaatgacacagatcatcttattaattgaaggaatataaatctgtcccttctcatttgaaggatagataatattcattcttggtaaaaattttaaactacttgcttcagctactaaagtgaatgaacccgtaatcaaagcctgagaagcaataatagcggcaatcgtagccaaagcaatagcaaacaatcttagactacttggtactgcttcaaaaaatggattgaaatcaccattaccagcatgataattagcattttgtaaaatccagacgccttgccctaaatagtttaaaatcaagcaaacaaacacataaggccaagagcccataatattacttttcccgacatgtccgacatctgaataaagagcctcagcacctgtagttgccaagaaaattgaacctaaaatcaaaatacccactttattagcaggactaaataaaatacgcaaagcatgaattggattaattgcatcaagcaaactccaatcatggcttaagttcataagtccaatgaaccctaaaaaagtaaaccacaggagcatgattggaccaaaggccttaccaatcacactcgttcccattctttgaattgaaaatagtaaaaccaggataacaatagtaatcaagataaccatatcttgcgacgaaactggaattacatcaccaaagcgcatatttttcaatccttcaattgaagttgtaacagtcacagctggagttaatgtcccatcagctaacaatgctgctccaccaattaaagctgggataactagccatttagccctctttctaaccaatgcataaagagagaagatccctccttcaccatgattagtcgccttcaaggcaattatcacatatttgaccgttgtcaataatgtaacagtccaaaaaatcaacgaaatggagccaacaattagttcacggttaacattactaatcccaccattttcagtcacaatcgacttcataacatacaaaggactagtaccaatatcaccatagacaataccgatagcaattaaaaggccagtaaaagacaccttttgcttaccagatattttattcataagtttttatcctctatttcacttaaaaattgaaatttttactagtatagaaaaagtctcgattttttgcaataaaaatatatctttttgaaaaataaaaaagaagatgaaatctccttcagtcacttaatttactttttcttatcttcgatggtgccatcactatgagcaataattacttcgtcacacatatccaggaacaagccatgttcaactacgccaacagtatgatcaaggtaatcagctaaaccatgaggtgctggaacaggatctgcagccaaatcaataatataatttccatagtgagtcacataacgttgattgccatccatacgccaccgaggctttaatccttcttgttcaaaacgtttaaagttttgttcacaagaaattggtaaaacttcaactggtaatgggaagccgcttaaacgatgcactaattttgattcatcaacgatccaaatgatcttcttagaattgattgctacatttttttctaaagttaatgcaccaccgccgcctttgattccatccaagttatcggcaacccgatcagcaccatctacagttaaatcagcttgatcaatatcggccaattcactaactttaaagcctaagccctcaagttgttttttactacggttactagtagttacgatagccttcagttttaagccgtcttcatctttgcgcttacctaaagcatcaatgaaaaaggcaacggttgaacctgtaccaacgcccaataccatacctgatttaaccatggcagctgctttttctgctgcttcttttttcaaacgatcttgttcttgcttgttcattattcatcatcctccatcgcctgtttaacttcctgttcagttggaattgaaggctgagcacctaaacgttgtacggcaattgaagatgcacgacttgcaattttagctgcttcttcaaagttagataggtcagaattcaaattgcttaccaaatatccaataaaggtatctcctgcaccagtagtatcggctgcttcaactttataagttggtattaattcttcaacatcgggagttgaaatatacgcacccttatcaccataggtaataaccacgttttttacaccaagcatgtgtagtttttctgcattagtggccagcgttgaattatctttaattgcaatgccagtgatcttggcactttcagtttcattcggtgtaatgatatcagtatattgcagtaattctttaggaatctcatcaactgcaggagctggatttaaaatagtgatttttttggcctttttagcaatcttaaatgcttcaagcgtcacatctagtgggatttcgaattgagcaattacacaatcccaactcttaatcaaatcaccagctgcacggatatcttccactgtcagttcataatttgcgccgtgatcaataatgatgtcattttgcccagcttcattcaacgtgatataagcatggcctgtctttgctcccattgtggtttgcacataagttgtgtccacgccataactcttgagctgatgcgtgataaaatttccttcactatcttcacctacacggttaataaagtaagtttcagctccacttttagcagctgcaattgcctgattagcacccttaccgccaccagcagtagtaatgtctagcgcattaattgtttcaccaggcttaggaaagtcttttacatgtaatgttgtatcaacattacttgaaccaataactacaatcttcttcattatgagcatcctcttctaaaaatggatttattcaacctcaattataacaaaaaacgtattcaaaatattgaacacacatttttgaaatcttactgtaaaataccaccattaacgaagccttttaagcgctcagcttcccacttcaatgtatctgaatcgtcaacttgcgagatcttatacccaacgaaatatggtgaagcatagaatcgtggaataatcttgcaacaagtaccttgaccatcattaattggatagaaaaataagttataagaatcaacaccatgtgacaagactgaacgcacatattgtgtgcccttttgaatcaaatcggcccaagtatccaaattagtattatcatgtgtcaaaatatttacttcttggtagccttgaactggacgcgctgataagttcatttcaactgaacccgaacgcccgacttcaaatcctttaaagttatcagcgccaatatcgtgatagccatctttatgatataagcccacgatctgcatatgtggatgagttaaagaaccatcagacttgggaccaaaatttttataccaaagcacactctgataacggcctgaattattcattttttgaaaacacttcaagccaaacttcatcaactcttgattatcttcacgcgtataagttgaaatatctccttggtgatcacttgattcaattaaaattgtttgattagtatcctttaacgtagggtacttattcttcaaccaaatcttatcgccatctttttcataaatattaattagatgctgcacatcacaaaaaggacagccagcattctgatttccttgccgattaccataatcataatcatatggcttacgcttaccaattgaatattcatacactaaaggattcttgtccatatttttcacctgctaaaccaaagatatcatacatttaacatcattttaacaattttatcggttaattgtgaacgtttttattaataaagctaggaatagtacgtctatctatgataaactacctttgtaaaagaaatacatgatatacatgagaggaagaatcatgaaattctataaaaaattggtacttactggtgccgcagctttagctgttctaggcttgagtgcatgttcaaataataattctagttcatcttcatctaataagaagattccaactaagattaacaagaagactaccgttaccttttggtattcactaactggtaatgcgcaaagcagtttgcaaaaattgactaaagattttgaaaagaaaaatcctaacattactatcaagttgcaaagccaaggtggcaactactctgatttacaatctaagttggtttcaggtttgcaatcgccaaaggatttaccgacaattactcaagcttatcctggctggctttacaatgctgccaagaacaatatgcttgttaacctaaccccatacattaacaattctgaaattggctggggctcatatgctaagagtggcattaagaaagctctttgggatggtgcaaacatcaacggtacacaatatggtgttcctttcaacaagtcagttgaagtacttttctacaataagaccttacttgataagtatgatgttaaagtcccaactaacatgagtgaattggcttctgcatccgcaaaaatttaccgtgaaagtcaccacaaagtacgcggtgttggatttgatgctttaaacaattactacatgatgcaaatgaaggaaacttacggcaaagacttcaataagaacttaaactttgctgccaaggattccgttaaagccatcaactactacgctaatggagtaagagccggctacttcatgcaagctggtactgaaaaatacatgtctaccccattcaacaatggccgcgtagctatgttcatcggttcaactgctaatgaagcttaccttaagcaaggacttaagaagggctacacttacggcgtagctgctcgtccaagcacgatgaacgtacaacaaggtactgacatttatatgttcaaaaaagcaaccgcaatgcaaaagtcagctgcgtttaagtaccttaagttcttaacttctaagtcatcacaactttactgggctaaacaaacaggctacatgccagttaatactgctgctatcaacgacaaggtttaccaatctgccaagaacagcaagataccagcaattattgccaagacctctaaaaacctttacttcttgccagtaaccaagaatgctactgccgcttatgaccaagttaatgcaaatatgcaaactattttggctaaggcatctaagaagcaatcatggactagtgatatcaagactggtaaaaataagcttgatgctgcttggaagcaataatttttcaaataaaatatctatcaaaaaaagaagttcagtattaattcaatgtcattaagttaagacattgacaaattatcgacttggacttttaagatcattcatttgcgatttatcgcatttgaatgctctttttcatgccaaataaacctaaatcttgtttagaaattaggctacacgatataaataatatacagctgatttgggtttgagatttcttttgtcttttcgtcctggtctgatcggaattgtgtaatgactaatttgaataagaatctttttaaagatttcagttgaagaagaaattatatacatagcctggatgacaaaacatgactgtttgaaattgatcgcatattgatacttgcattttttttgtggtacatatgcttgagcatcaatttgactgactgcgttaaacataatcatgtgggcatagatctccatttcaataaatctatcctgcttggaatgaaactgtacgctacctaaagcatatttcaactttttgaatgaagtttcaatgccccagcgcaaatggtagatttctttgatcctttttaagggataatcggctctatttagattagttagaacaacttcccattcttctttgcctgatttaggatcattaattctaaatttacaggcacgaaattttattgtacataactctccaaagtcccagctgccatctttggtatttttagaccgatattttatatattgacggtaatgatggttaaccaaatgaacgttttctgtagccttatgggtttcataataataattagaggtagtcacccagcaagctatatccttatcacactcttgattaggcaactcagctacttccttaaatgcgccatatcccgttttagtacgtatgacataataacagttaggcaggcgattacaattttcaatcatgttaaagccggtataacctcgatccatagtaactatatatggtccgcaatttagctttttaagcatttgaacggcggctttacgttcatccatctttgacttaggctgaaagatgcagtcttgataagtattatttaacaggtcatagagtgcattaacatgaatttggcaatatggctttcctttatgattgagatttccaacgatattctctgatttaggattccagatttgattaaaatcagacccatcaatggcaaatatacgatatttatgatcaaataactggatattaaataaattctgattaaatacagttagaatatgcttaaaacatgcgggtgaaagctgacctttgcgttggacataagcggaagtactgaccactttatcgttatttttaatagctttttggccaaaagctctaaacaactcactggtcaaatcttttccttgcatattaatagtagttttaatgactgtagctgcatctaaaaaccgcttcctagtgaaggcatgaggatcatcgataaaatcatgaatatgctttccagtatcattgataatttgatcaagacgatctaaaatatttctgtgaagggctttcataattaacaccagctttctggcaataattttgaaggtttaataatttaatcagagggcgaaaaggtaggttcttttctcctttattttatgcaaaaaaagaaccaaatcataatgattcggttctacagagattagattcaatttgtcaatgtcttaacttaatgacattggtattaattgaacttcttttttttacctaattatttactaaaaatggatattgaatttgatcattatcagttacattcaacttgtaacgagcacgatataaagccttttctaccgctaattgccctgcagttgtggccattgcaatcgaatatgacttgtgtggtgaattgatcaggatttgactgatagaatgcttaatgtatgactggattagaatgacataattcgattccttacatgcacgtaaaacattagaagcctgtttcatctcgataattcgagctactccattgtgtgcttcaatcaccttagccaagttagaggttaagctcttgtctcctactacaacggtaactcgttttttatcgaggtcaaaatcaattcgggaagcatagtcttcattttgcttttcagacgcctgcttctcctttttttctaattgatgcaataaagacttgtgtctacctttagtcttgtgcttttccgtttctttatttttatccggcttttccttcttttctggaatagtaacttcagcttcggcataacgccatctaaccctaatgaaggatggatcactgactcgccaaacaatactaatcaggtcattttcgtgtaagttaaagtgacttacagtattcatgtctaagtataaaatagctttttcaggatttacttgacttaggtttttgccattagagtcctgcttgatgtataaaccaaaagaatcacggtgaactaccgctggaccaaattcgataatttcctcatctggcgcaaaagactttgcatgatgctcaactttaataattggacgattgccactgtcatttaagtgatctagcaaagtaactgtatcaccgttttccagcttttcaattctagtcaagtgttcattaaaatattgtactgaatgaccattctcatccactgcttctgcacctagcagcttacgtctaatctcatattgtttttcctttggtttagccacaggaattattttcttaaccacaggcttaggaataggagttatggtcgcatatttgtttttattctttaaaatcgtaggactcagagctttagcagcttcttcttttttagctttttctttttcaagctcttccttcgtttttttcggctttattttttctacagtattttcatcattttcttttttagtttctatttcagttttattttctagcttattctcagtttttatttctggctcattttttacagcctgatcagctttttccgcaattttaacgacttcattcttattctcaggtggattgcctagtactgcctggttatatattttactaataattttcaacgcaatcattgactgcttcagtgattggggatcgctccccgtcgcctgcattaaatcaataatatcttttctataatcaatcgtcatatatttaccttcttacttcttaaatatgaatattatacaaaaatttgaaactgtcaaatcttttgtgtaaatagatttttctcgtagattgattttttaatcttttatttaatcaaagtaggattctaaggtatcctgaacctgaccgaagcctttgtggattcgattgaaatagcgttcgttgtagctcattgcttgaatgccaataaaagtatcaagcgactgttcatttggaaactctgctttaggtttagctttacgcttgataacgttgttaaaggattcgatcatattggtggagtaaattgaagccctgatctgcttaggatagctgtaaaagaccagcagatcaggctcaatctctttgagatctctgatgacatggttgtacgctctgttccacttgtcatagaaggcgtgcaagactttgatcgcagcttctttatttggctgttgatggatttgcttgaattcattcatgatcttttcacgatcgtcgacgcgtactttagcgcagatattgcgcatgacatgaaccaaacagcgttgaaaatgagctttaggataagtcctggccaaggctgttttcatgccaacaacaccatcagaaagaaaaagctcaacttgctttaagcctcgggatttcatgttttgaagcatatctgtccagacttcaatgttctcgctaggtgcaatgcagtagtcaatgacctccttgtgcccattaggcttgatgccaatggcaatatagactgcttcacgctcaaatgtttctcggcgcaaaggaaggtatgtcgcatccaaatagacgcagaaaaacttgtcgcttagcttgcgtttgtggtaagcctcaacctttggaatcatctgcttggaaatatttgatacctgagctggactgtaatggctgccatacatcttttcaattagatcggctatttccctggtggtcacgcccttggagtaaagcttgataatcatgctttccaagatatccgagtgctgcttgtagccaggcagcgtgtgctgatgaaattgaccgttgcgatcccgaggcacttgcacttcaattgggccaaattgcgtatcaactttgcggaaataagcaccatttctagagttgccagtattccagccatttctggcatagggatcatagcccagaaaggcagtcaattcagcttctaacaagttattaacagcctgttgtagctctttgcgcaataaatcatttattttgtctggattgaatagagcttgagcaaaatctttggtaaaatcattcatgaaggagttcttctttctgtatgtgtttttttgttcaaaccaatcatacgagaaaggaactcctttttctaatgtttaaagaaataaatttaaggaatcattcatccttacacaaactattttacagtctcaaaaatttttaatgctaatctaattctttatagatttttatattatttttcctgtaaaaccattataataaaagtagttaaaatatcatttattaaatgagggagactactatgaaaaagaaacttttacttttcgtatcctttttagccggtttattgttcttggtatctacaccaacttatgctagcaagcttcctaaaggctatggtattgctaaaacctttaccacaccaaaagcaacccgtggcacctggtattatcgcgaaaagggtgataaaacaatttctaaggtaaagatcactgctcatagcgtagatggtaaaaagctttacgtaccttcacaaaagttcttcgagaaaaatgtttacaacgtttcagctaagaagcgtaatcagttcatcaaaaaaactgaaaatatttatgctgcagctaactataaaaagggcttcaatgtcaacaattgggttaacttagctggtgatggtgaatactacatccctgttactagaactgttaacggcaaaaaggttaaggcattaagaatagctactggtgctggtccttatactgctgcatatgcatacaaaactaaggcattggttaaataatcattgtctaacgaaaaagcaaattagcataatttgcttttttcttttaccgatttttactttttcgtatttctccttcaaaaagagcggtcaattttgccaaactcttatgatcaggatagcgttgaactaattgctcaattttatcggtagctaatttttttacttcttcggctgagcccattttctctaaaaaatctgccaaatcacctgaacgagcaagtaacttacgctcactacgactttctgccagaaaagcttgatcaaccttacgtaacttcaaactaccatctgcattaaagtgatatcctccccacatatgctgcttaattggttgcatcggttcgctatctacataacacaattttcctaccatatggtgcgtctcagtaattcctaacgtaaccgggtcataaatatcgacatagttaaaaattttctcccgcattttagccacctgacgtcgttcagctggcgtcagtaaaagccaaatattggttccttcatacagataagcagctgcaattgcttctggatgacgacaattagctaaagcaaactgagcattaattgaacctaacgaatgaccataaatataaattctactacctttaaattgattaattgtctgattcaataagtgagcagctgattttaattggctaggaatcgtccgttttcgtgcaagcagtgcttttaaaattggtagattagttttaatccattcatcacgccaagtttgtggagtcccctttttaaaaccatatgatcctttaaataagattgttatttcattcggacttgaaatgacgaaggctcgcatcccatccttagcataaacattacgacaaacagttccaagataatgttgatctattttgatagtatcacccagctgcaattcatcatatgcctttttagttaattcaactcgttcacgatctgttaactgtgcatttacactcataattttccctaaaataaaaaactaactcttactattatgttagcatgagttagtttttttggataatttgagcctttaatcatattttttctgcaagtaatttgcaatcgttgacaagcagaaacagacaataaagtacatgattgcaataatcacatacattggaattaagtaagtcgtgttctgactgtaaataatttgtgcgtggtataaaagctctggcaaaacaatgatagttgccaatgaagtatccttaactaatgatacaaattgtgataataatgccggaatcatattgtgcaaagcttgtggcataattacatgatacatagcctgaccatacgacatcccgttggaacgggcaccttccatttgacccgaatcaactgagccaattcctgaacgaacaatttctgctagcattgcaccttcaaagatgactaacgctgcaattgaagctgtcgttggattcgttacaatacctaattgaggtaaaccaaaataggtaaagaagatgatcaacaatagcggcaaatttcgaataatatcaataataaagcctacaattgcagacacatacttaattttcatgtagcgaactaatcctaagattaatcctactacgaagcttaatgcaattgaaattaatgaaacataaatcgttacccaaagtccttgtaataagaagcggatatcgacccatgaatatgcatgaataaaagtttccattctctatccctttcctattagttgactaattttttctctaaatgacgcatgtagtaactaagcggcaaagtcaagatcaagtagaacaatccaacaataatataagtatcaattgtttggaacgttgagaacgcaatcaattgtgcttgatacatcaagtcaaaaccggcaacaaaggccaaaactgaagagtttttaaccaagttgacaaactggttgcctagtggtggaatcactatcttcatcgcttgaggtaagatgacataacgcatggcttgcacataggtcataccgttggagcgagcaccttccatttgaccagttccaattgaattaattcccgcacgaacggtctctgcaataaacgctgatgtataaagcgttaaaccaattgtccccgcttgaaatcctgacaatttcacaatataacgtggaacgatcaaataaaagatcatgacaattaccagcaaaggtatatttctaaaaatcgcaatatagatcttcgcgatcacttggccaaatttagatggtgctacctcaagcaaggcaaaaatcacgcctaaaatcaaactgaaaactagagcaataatactacttaaaatagtattccaaaaacctgttaggaagctgccccagttgttagtaataatttgccacattatttcaaaaccccctttagactaaaaccaggaattccagcaaaccactttttaatcaaacggtcataagtaccattcttttgtaattcattcaaagcttggtcgatatgatcagccatttgtttttgtcccttattaacagcaattccgtaaggagcattactatagacgccgccgactaacttataaccaggattttcttgagcgataccggcaagcaaaccgttgtcagtagttaatgccacaccttggttagccttcaatgcagacattgcttgaccatagtcatcatattgcaaaatccgcgctttaggggcatacttatgtacatcatcaactgcggtagttcctttaacggccaaaacagttttgccttccagatccttaacattcttgatcttactattattaggcactaacaaagatgaaccggctggaaagtatggcttagagaaggttacttgcttggcacgttctggtgtaatagtcattgtggctaaaacagcatcaacatttccattttttaaaagtgggattctagtgttggcagtagtagtaacaaaatcggttttagcatctttacctagcatttgcttagttaaagccttagccaaatcgatttcaaacccttcaatatgtcctgtcttaatgttcgttaagccaaacaatctagtatctgctctaacgccccaaacaattgtcttactttcttttaccttttgataaacattattgctagcatgcttgccacaatctgttaaggtaaacgctaatagaatcagcaaaggcaagaaaagaaatctttttatctttttcatggcgtgtcaccttaatctttagaaataactttgcttaaaaattgccgagcacgttcagtatctggatgagcaaagaattcttctggcttgcgatcttctaaaatatgaccattatcaaagaaaattaagcgattgcttacttctctagcaaaacccatctcgtgggtaaccacaaccatagtaatgccttgttcagcaacatatctcataacttctaaaacatcttcaatcatttctgggtcaagggcactagttggttcatcaaataaaatcaccttagggtgcattgctaatgatctagcaatcgctactctttgtttttgtccaccagataattgacgaggataagagtcaattttatcggccatacctactttttcaagatattgcatcgctactttacggttctcatcatcaggacgctttagcacaatcttaggcgccagcataacgttctctaacacagtgtgattattgtagagattaaagtgttggaataccatcccaacatttttacgaatcttattaatatcggtctttttatcagccaaatcatacccagttacaattaattgaccgctattaattggttccaagccattcatagttctaattaaagtactcttacctgaaccagatggaccaataattgaaaccacttggccttcatcaatctttaagttaatatctttcaatgcatggagctttccgtagtacttatcaacatgcttaaattcaataattgctgtcatggcttctacctttctttcctttgtctacacaatataattattttactcttcttaaagctaaaactaaatattttagcaattcaaaatagtataatagcctgctaatcttataaatttattcggttttagcaaaatatatttgtatttagctagattaaaataatcatattaacgctacttacgaatttattaactactaacttttaggataaagaaaaagtccctcatccctaaactgggacgaaagacttctttccgcggtaccacccacattgcctattagatatagacctactcatgaagcactatcatgcttcaccggtgtggtaacgtaccggagacgtctcaacctactctaagaattgttatttcggtgagctgctaaaagtgtttttcaatagttcagggtctattggcttttcactagcaccaactcactgttagaaataaactatctacttgtctttttcatagccttttaatttatttatatgtatttaaccttattttgggataaaaagcaagcaaaatttcttatacttcaaaatgaatccgtttttaatacaaataaatgctgttaatattcggaaaatagcttaaaatatttagtgatatattgaaaaacaaaggagtttgaaatgggaaaacttgaaaaacccgttatcattggaattgccggtggttctggaagcggcaaaactaccatcgctcatgaaattgcggataatattaatgatcaagatcgcattatgatcatgacccaggattcttattataaagataatactggtgtatcaatggaagaaagaatgaaaattaattatgatcatcctgatgcttttgatatgccgctacttgaggcacaattaagtcagttaatgcacagaaaaccgattgaaatgccaacttatgattttaccgctcatactagaagcgatgaaactattcatgttgagccggccgatattattatcttagaaggaattttagtcctcttcaatgaagatattcgcaatttgatggatattaaagttcatgttgataccgatgatgatatccgttttattcgccgacttgagcgcgatatgaaggaacgtggtcgttcacttgactctgttattaatcaatatttgggtacagttaagccaatgtacaaccaatttattgaaccaaccaagcgctatgccgatatcatcgtacctgaaggtggggaaaatgatgttgcaattgacatgttaactactaagttacaatctgttttgaaataagcagcaaaagacctgataatcacaaagcgaagattatcaggtcttttctttattctaaattatcttaattttgattatcatcttgtgcattagctgtgtccaaaattcggttatacttcttggcaaagaagaccaaaagcaagacactagcaataacataaattaccgctgcaatgtaataggcatttgcataaccatcttgggtagtaaataagtaaaattcggtgaagagtccatcaatgacaccgacaacagcataagcaatctgaaccacaccggtaaaggctggacgcaagtccttatcaacaataaccatctgaacttcttgttgaattggcattggctaatcctgttcttaagaagagcaaaagaccgacaattacaaacaaaactgtcccgctacctaagcgacgaccgttagctagcaacaacataactggcacacaggtcaatgtacttgcagcaacagaaacaatcgcccccatcttcttttccaagaatggcgcaaagaaatatccaattagcatcgctgcttgaacaaaggtgttaatggtagaagtaacatcacgtggaatgtgcaaataactattcaaataaatcggcacataaacagcaactaaacgagcaccaagttgaataccggcaatatagacaatccacatcaatgtcttcttgctcaaaagctttttatacatagccatcttctcttctctgctaggctccttgtcatctgcagtagaacgataatcacgtggcacatcatgaataaacaaagccaaaacaaaggctaacatggttacggcagccgtaatgtaaagcaggattctgtatgaatttgtataatctgctaaagtttgaccagttaacatctctgacttaccagaaagaacagatgcctcatgataaggaatgcctctaatcaaaccaaagaaccaaacgacagctttcccacctaaaaacgtacagatcgtttgtgtaatcaaattaacaatcattactgttgagaacatcttagttctaatttttcccggaacatatgaggtccacattaatggatacatcaaatcataaaccccaattgctgtccaagaaatagtataagcaatcatgataacgagctggttagtcgtgatacaagttaaagccataaaaatcgcagtcattggcggcaaaatcaataaaatcttgcgataaccccacttgtgaactgtagcgatcattactgacatcaaaatagcagttgccgcattaaaaatgtttaatccagaaatcaggtgtggcgctacaattttgtaataagatagagccgcatcattcgtaatcccagttactgcacccaaaatgccgtagatccataaataaataataacattatgtttgtaacgcggattccagttcttaattgcttctgcctcagcttccttttctgcattacttcgtcgagccatataaatcccctttttttgaaaacgtatacaatacatctaactttattctatcactcaaatggtattaataaagtgtgtgtatacgaaaaggtatggtttatagtttctaggcaactttaggttttaatgctttatcgaaaagattggtaatcaatttcactaggacaccatcaaacagtaatgatgaaatcatacttacaataaacatcaaaatttgtacattaacctgataatgactccaaccaaacaaaaagtaacttggtataaaaccacctaaattggcaaagaaagcaccagtcaaaacgctcttccatgagaacttttcatagcgttcttttttagggaaaaagccgatctcgttcattgctccttgaattagcccctcaaaaatagtcaaggctccccactggccaccgatcgccatctcaactgtggcagccagcaattcaccaatagttccagctcccttagttggtacaaaatacatcgctaaaggagcagccatataccataagccagtaaaaacgttgtcaacaaccggtgcataaccggtgggtaaaaagcttaattttactaagttatacacattgttaaagccataagtgtaaatcacacccatgatgatcccgattaaggcaactaaaataactgattttacattccattttgacgatctagtaaacataaaaaatgctccttactaacatactgtcagtaggagcacacaaataaaagttaattctcttgttagcactttcccttgcgcaagtattatcttgttcaggttcgaagggtattatctcagcattacgcacccctagtgacatttcatttatttatcaattaagtcaagtatagcacattgttaatcaaatgccatttgatctgtgtaaagtttgtaataaaatcccttttctttaagcagtgcctcgtggctgccttcttcgatcacattaccatcttttaacacaacaatcttattagaattcaagatcgtctttaaccggtgagcaatcacaaagcttgttcgtccagcaatcacagtatccattgccttttgaatcttttcttctgttaccgtatctacgttagaagttgcttcatccaagattaggaatggtggattcgttaaaattgtccgagcaattgacattaattgcttttgcccagttgaaaagattgagctagcatcgctaacttgagtatcgtaaccatcaggcaaagtctcaataaaatcatggatattagcctgcttagccgctgaaatcacttcatccattgaagcattcggcttaccataacgaatattgtccgctacagtaccagtaaataagacagagtcctgcaggacgatcccaacattatttcgcaatgatgttagttgaatatcacgtacatctgtcccgtcaaaggttactttacctgaattaacatcatagaagcgatttaacaggttcataatcgtagttttacctgaaccggttggtccgaccagagccactgattggcccttatcaaccgaaatatttactccgtgcaaaatttctttatctttattgtagccaaaatgaacattttctagcttgacaccatgattcaaaccactaatgaccttaccatttggcacttcgttttcatctttttgttcttcaactgtagctaatcttcttgccccagttaaagctaattgaatcatggaataaattgaagtaatttgcgtcaaaggttggaaataaacttgtgaatattcaacgaaagttacaatcaagcccaatccaatagcctgagaaatttgaccggaaataatcatccaagaccccatagcgatgacaattgccaaattaagtaagttcaatccgttcatcaatgggaataggattcccgaataaaattgccccttaaacaaagcggttcttactttattgttgtagaccttgaagctatcaaccgattcttgacgcaaaccattggtaataatcaccttttcaccattgatctgttcggtaatataaccatttaaatcgccaatttcatcttgctgcttatcgatataaacgcgagcttttttcattaaaaggacactaataatcaaaatgaatggtgttgtcgcaatcgtagtccaagccaaagtactattaatcgtgaacatcacaataattgttcccacgaacataattccctgggaaataatttcaaaaatcgcattgttcattgcgttgaaaatattatccaaatcggaagtaaatagcgataaaagtttaccatcctgatgagtatcaaagtagcgcactaacatccgttgaaacttggcaaatagattctcacgcatgtcattagttgaatccgcattgaacttggacattaccatccaagcaataaaaatcgctatctggctcaataagtaaaacaagaacatcgaccataacgcgctatagaacgtgttcatggatgctgtacccttttttaaatcaaccaaataagtagttaaagcggtaactgaacggcctaaatatgtaggtgccataacctgtgcaccactcgaaatcaaagaaaggataaccacaatagtgattcccttccaataaggcttcaaatacttagcaaaatagcgcaatgcctttttcgtattactcatttattcatttcctcctttcttacctttttgtgtcttgaagatttcttggtaaaccggcgaagtcttaagcaattcttcatgcgtaccttgtgccactaatttaccgtcatctaacactaaaattgtatcggcattaatcactgaaacaatcttttccgcaatgataaaagtagtagtatcaggcagctcatgctctaaagcttgctgtactttcttctcactttccgcatccagagcagaagttgaatcgtccaaaatcaaaattggtgctttagcaatcaagccacgtgcaatagatagacgttgcttttgcccaccggaaaagttagcagaacgctcctctacttcatgatcgaaagaatcgttataacgctcaataaattctgatgcttgcgccatattggcagcacgctgcaattcatgtaatttagcctgagcattaccttgacgcaaattagatgctattgtacctgagaaaagaactgctcgctgcagcacaaaagaaacagttttgcgtaatgcagcttcagttacatccttaatattttgaccgccaatttttacttcacccttagttggatcatataaacgagcaattaattgggccaaagttgatttaccagcacctgttgccccaacgataccaaccatttgacctggcttaatcttaaacgaaatatcctttaaagtaggatcatccccatcaggataagtaaaggaaacatgatcaaactctacgctaccgctaagaggtgcaaccgaaccactttccacaaacttgacatctggttcagtctccaatacctcacgaatacgtccaagagaaatattagctcttgaaaattgcattaaggtcattccggcaatcatgatcgtaaatagcagggttaaaacatagttcacgaatggactgactaccgcaatatcacttggatgtgccgtaatatttttaccaattaaataaacaattaaagcaattacggtataagcgatcatctgaaaagctggcataattgcagagaaccagtaaccaatcacaatgttgtagtcattcaattggtccgaagtttgatcaaactttttaatttcttgtggaccttgattaaatgacttaaccactctcacaccttgcaatgtttcttgtgcttgattagaaattcggtccatcatttcttggaatttggtaaacaaactattcatttgtcttaaaacgtaagcgccaaaaccaaaaataagtgcaaccatgaccactggtgcccaccagaagcgcggaataatcacgatacagaagataaatgaaccgacaattaaaatcggcaaccgcaacatctgcataaatagctgcatcatcatgttcattacctggttcatatcgttgatcaaccgtgtagttagagaacctgctgaaaatttcttaatattaccaaaagagaacgtttgaatcttagcataggtatcttcacgtagatcactaactactccttgtgcaattttcgctgcaaaataaacgttaaaaatacccgaaataattgcaattatacctaggactactagccagattccatcagacaagactgcttgcttctgattcgccatcaatgccttttgaatgttttccaataatttaggctgatataatccagaaaacgctgaaactaagatagcaataattgcacaaacaacatcttttttataacgctttaagtatggaagaattattttaaagttttccatttttactcctttcttcacttaaaaaatgccaaaaagtagtgctccattcttctgaaagcttagctaacaatttcattttgtcagttcccatggcttgagccgttttttcctctaactcaaatagaggacgcaacctgtcataagcatatttccgccctgcttcggtaagctggcaaaatcgaactcgcttatcgctaggatcaacagtcatcgtgatatgatcatgatcacgcagaatcttaattcctttgttaatcgactgcttgggtaaatcactcagatttactaattctctttgtgtcaattttccccgaatcagtaattcatacatgattaccactaaatagtccggcaagtcatgatcctgctcccattggctataagcacggctgccatggataattgatagatttaatttttctgtctcactaattttcattacttcaccaccatatttagtctacatgcatgccaaatatattagtatgcacatggactattgtcaaatcattttgtcaaaaataagactataattaaagtaaagaaacaatttttgcatctaaatttcaaattggtataataaaaaaatcatcaagtaaaacaaggcagggattatatgcgtaaaaagtttttattaataatttcaatagtggtcctgtttgctttgccattaagtggctgtaagcaaaacaaaaagcaaaacgtttatcaagcagttaaaactagtaaaaccattaactggggcgtcaaagccgacacgccattattcggctcaataaatattaaaacaggcaaacttaatggctttgaaattgatttagctaatgcattaacccatgaaatgctaggcaaaaatgccaaagccaatttcataacaacaacggccaacaccaagattcagcttctaaaaaacacgaatgtcgacgccgtcattgcagcaatgaccattacgcctgaacgtaaaaaacaagtcgaattcagtcacccttactttcctgctggacagtcaattatggttgctgacagtagcgccattaaaaatgctaaaaatttgaataacaagaaagtgcttgtagttaaaggaactactgccgccgatgctatccatcaagttgctcctaaagcggaaattttacaattcgatgattacggccaagcttttgccgcattaaaagctggacaaggagatgcctttgtaactgataacggaattttagctggaattttgcgtgatagttccggctataaattagttggcggcacctttaccaaccagccatatggtattgcagttaataaggggcaaaatgacatgctcaagcatatcaacactgcattagcaaaactagaaaagaatggcacatataatcacctagttaaaaaatggtttggcaacattcctggtatgaacattaaagaactagaaaagaaataagaaaaaggctaagatcaaaattttgatcctagccttttcgcttatttagcaatgaaatcaagtaaagtaaacattacatctttatttttctcaggcacaccatgattaataatctctgtaggcgtttgatgtaaatcattattttctaaagcatatgctccatcattaatagcaatctcacgcacattatcaatttgcggttcaaagtggaactgcaacccaattacattatctcccagtaaaaagccttgattcttaactagatcactagagaataataacttagcttcggttggaatttcactcatttgttcatgccaatgaagagctgttaacttatccggaattcctgtaatagtctgatcttgcaaataaactggtgcccaacctacttccttagcgggtgcatcaagtaccttatagcccaaagttttagcaatctgctggctaccaaaacaaattcccaagatcggcttgtgttgatctaacatttgtctaatcaacacacgttcatttttgacccaatcaagatcatcattaggactgtttggactgcctaggactactaatagatctgtttcatcaacagttggcaaaataccaaaattccctggatggtaaacgaacatttcgttatctctagcatggcaccaggcttgaatagaaccaggtccctcattaggtgcatgctgtaatacattaacgcgcatgaaatccctttctcactcaacaatatttttgtttttcattttatactcaattctagtggtaaacaagaagaattcagttaatcttttactgtatctttagaaactatatgtcaccttatatgatataatgttatacatatttttacatctggaggacttttatggacaatcaccttaaacgcagtattggcttaggttctgcactttcaattatcgttggaaccattatcggttctggaattttctttaaacaagcttcagttttagatagcgcaggctcaacctttatggcacttttagcatggattttagctgggattatcacattaaccgccggcttaacgattgcggaaatcggtgcccagatgccttatactggtggactttacgtctatattgaaaaaatttacggccgcgttttaggttttatggctggttggatgcaggctattgtgtacggtcctgctatgatagctgcagttaccggttttttaagtattatggtgactaatctctttggcatcggcaccgaatggcgtattaccattggtttgatcactatcatcgctatcggcggtttaaactttttagaaaataaagtcggtgcagcctttgctataatcactacaattgctaagatgatccctatttttgcaattatcttctgcggcatctgctggggtgagcaaaacgctgtcgcccaaactgtgactgagctgaatcgatcaacaggtggtcttggcgtagccgttctcgctgccctttttgcctatgacggttggatctttattgcaaagttaggtggtgaaattaagaatccacaaaaattattacccaaagcaatcatcattggaatcactacagtattagtaatttatgcgttaattactattggtatttttagtttcatccctgccgataaaattcatgcattaggtaaaaattcaaccacttatttggctgacactattcttggtccaattggcggtaaagttctatctgtcggcattattatctcaatgctaggcactcttaatggagaaatgctcacctttcctcgtgttatttacgctatggctaagcgcggggatttgcctttctcaagatttttatcatacgttacacctaagggaaaagcaccagttatggctactatgctcttaattgccttaactggaattatgatgactttcttcgatcctgattacctatcaaatctctgcgtcttcacaatttatagtttctatgttttagcattctttggcttattcattttaagatacaaaaataaggaccaacgtcctttcagcgtgccattttatcccctaattcctttagtagcaattgcaggcgggctcttcgttttagtcagccaattcttcaatgatcccgctggcgttttgctttttactggaattaccgctgtcggctggccaattttctttttagttaaaaagatgagcagagcacagaacacgattatcgaagactaaaaatctcaaatttttcttgttcatttttaataattatgatattctaattaaaattaatttaggagattcaattatgatttatcaagacaccacattggcatactcatctagctcaagttccaactgaacttgagtgattttggtgtacgtaaatcagcagccggattcactcaatcgtttctagacgataaggtgaatccggttatttttgtataaaggagaaaaaatggacaacaagcttaaacgcagtattggtttcggctcagctttttcaattgtaatcggaactatcatcggctctggtatcttttttaagcaggcttctgttcttgacagtgcaggttcaactacaatggccttattagcttggatttttggtggtctaattaccttggctgcaggtctcaccattgccgagataggggcgcaaatgccctacactggtggtctttatgtctacattgaaaatctctatggccgcattttaggctttatggctggttggatgcagatcatcgtgtacggtcctgcaattattgccgccgttgctggttttatgagcatcatgatgactaacttttttggtttgaatcattcatggcgcattcctttggctttaatcacagttttagcaattggaatcatgaatttcttcgaaaataaggtaggtgcaatcttttcggtcataaccacgattgccaaaatgattccgattgctgtaatcaccatttgtggaatctgttggggtcaacaagatgcgattaaccagactgtagcagaggttagtcaacacactagtaacttcggtgttgctgttttagccactttattcggctacgatggctggattttaatcgctaatttaggcggcgaaatgaaaaatccccaaaaattattacctcgagcaatcattgcaggaattacagctgttttggctatttataccctaattacaattgggattttccgcttcatccccgctaatcaaattcaccaactaggcgaaaacactactacttatctagctaacgcggttttcggtgcaatcggaggtaaaattctttccattggcatcatcatttcaatgatgggaacattaaatggaaaaatgctcacctttcctagaatcgtttatgccatggctaaacgaggagatctacctttttctaaatacttagcctatgttactcctaaaggaaaatctcccgttgttgctactttgtttatcgtccttttagcccttttaatgatgattttctttgatccagaccacttatcagatctttgcgtctttacagtttattgcttctatcttttagccttctttggaatttttatcctaagaaaaaaagaataaagcagagcgtcctttcagtactccactttatccttttgtgcctataattgctattttaggcggtttgtttgtcttaatcagtgaattaattaatgatccagctggtgttttactttttgctggaattgtcattattggattaccaattttttacgccgttaagcgcatgaacaaacatcgtttgcattaaagcgacctttctacactgtagcttgctcgccacaactcttccattttagctaaacgatgccaatcccctttttgacacattgtatataaagcatgtgcaggatcataggcaattggattaccttctgtttccttcaaataagctccaacaatgttgattaacatcatccgaaagcgttcaatctcatttcggctaaagtaagtttcaaaatacttgctggttaagcaatcaaccgttgcttgcgaggccttatgcaaagaagccggattcttacgatagttatataaagtataggttgaaattcctgttgccttacttaaactagtaatcttcacattgcgatcagttaccaatttttctgctctttgtacatcggttaaaattttcggatgcttaatgtgaggaggcatcggaatacgtttgcttaactctgcaattactttttcagcagcttccctcatttgctgagtggctactgtctcacttaccttgtcatcaagcaattctcctacaacgaaagtatgatcagtcacttcataccttctagtaattgcattgtaaaaatggccttcaacccctgtgatcttaactgcatcagttccagctttctcatagtcaaaaaagatgtgttgttgatcaccagttaatggtgaaaatggtaaattatctaacgtaaaaacttgtacatttaaagtataatctgaatgaacggaatcttctgcatcactacgatacattttcacttcccgatcatgaataaaatcttcaaaaataagattttttccatattttttttcatttcttaatccccttttatatagtcctattatccattataagcaaaaaactagcttttaaaagctagtttttgtttttattagaaaatattcggtttagggcaaataattaccagcagctaagtataaatcgtaccactcttgtctagtcaatcgaatcttggcacctttagcagaatccctaatgtgttgcggattcattgatccaactagcatttgaatatttgcaggatgacgtaaaatccaagctgcagcgatcgcatttttacctacctcatacttatcggccagtttttgcaactcttgattcaacttggggaagccatcattatcaatgaaagtcccttcaaacatgccatactggaatggtgaccaagcctgcacagtaactttgtgtagacgggcataatcaagaaattggctatcacgatcaactgatggtttatctaccatattcatatgcatcccaaagtcaatcattcctgtatgtttcaggctaaattgtaattgattgaacatcaagcgctggctcaagcaactttgtaacaatttaaattgagccgtatcaaaattagatacgccgaaaaagcgcaccttacctgctgcctgtagttgatcaaaagcctcagctacttcttctggatccatcaatgcatctggtcggtgaagtactaatgaatcaagataatctagttgcattctttccaaaatttcatcaacactatgcaaaatatgttctttagaaaaatcataacgttttcctggaacaattcctgttttagattgaataaacatctcttcacgcttgatctgcatttggctaaaagcttgaccaaaaatctcttctgattttccaccgccataaatatcagcagaatcaatgaagttgatcccagcatcataggcggcttgaattgccacttgagcctctggaactgatttttgattcattcgcataatgccaagtgccatcgctggaatgcttaaagtagtacatcccattttaattcgtttcataatgtaagtcctttcattctttatttacctcacatcatgaaccaaaaatagctaagtttcaaccacaagaaattcaataatcttttattaatatatcttagctactgccgattgaattgattctttatctaagaattcgtcataacttgtatcttggcgactaacaatacctttaggtccaacttcgataatgtggttagcaatagtttgaataaattcatgatcatgtgacgtgaataaaattgaacctggatatgaaacaagggcatcatttaatgcagtgattgactcaagatctaaatgattagtaggatcatccatgatcaatacattagccggttcaagcatcatacgtgacaattgacaacgaaccttttccccaccagaaagtactttgatcttcttctcaatttcttctccactaaagagcattcgacccaagaacccacgcaagaatgtgttatcatcttgttccttagtagcatattgccgtagccaatctaagattgtaagttcatcattattaaagttagcgttcaaatcgcgtgacatgtagttaaaggccgttgtttgaccccatgtaacggtaccagtatctggcttaagcttaccagcaacgatatcaagcagcgcagtcgttgctaaagcgttacgtgataaaaatgctaccttatcaccaggacgaacaataaaggaaacattatctagaattttttcaccatcaactgaataagaaacattttctaccttaactaggtcattacctaaatcacggtgcatttcaaactttacaaatggatacttacgactagatggcttaatatcatctaaagtaatcttatcaagttgtttcttacgagaagttgcctgacgtgatttagatgcattagcagaaaagcgggcaataaattcttgcaattgcttcatcttttcttcttttttagcattttggttagcagctaattcattagctagtttgcttgattcataccaaaagtcatagttacccacataaagctgaatcttaccacgatcaacgtcacacatttcagtacatacttgatttaaaaagtgtcggtcgtgggaaacaacaatcacaatgttagggtaatcagccaaaaagtcttctaaccattcaacggtatgaacatccaaaccgttagtcggttcgtccaatagcaaaatatcaggattaccaaacaaagcttgggccaataagaccttaactttttcgctttcaggtaaatccttcatcatcatttgatgttcttcttcaggaatccctaatgattgcagcagcttagccgcatccgcttccgcattccaaccatcaagttctgcgaacttgctctctaattcagctgccttaaccccatcttcatcaccaaagtcaggtttggcataaagagcatctttttctttcattacttgatacagttccttgtgcccttgaattactgtgtccatgacagtgaagtcttcgaaagcaaagtggtcctggttcaagctggacatgcgctcattaggatcaattgaaattgaacctgttgttggttccagtttcccctctaacaatttaagaaaagttgacttaccggcaccattggcaccaattacgccgtagcagttgcctggagtaaattttaagttaacgtcttcatagagtgtgcggccaccaaatcgtaaactaacgtcggatactgtaatcaatctctttacctcgcttaaaatataaaattatgtttaagtatatcaaaaaagatggtcccttataatagagaatccatctttttaagcaatttattaaaactttttgaagctatctagcttttcctgggtaatatcacgaataattgcagtagctaaatcaactgaagccttaaagtccttataactactgaaacaatatggtgaatgttcatagcgcaccggaataccgatgacaattgttggcgcaccattttcgtagtaaattgcagcaccatcctgaccgccaccggttctaactgaacgagtatatggaatattatttttgtcagctaaatcacatgcatattgttggaacttaggatttggtaaaaatgtcgtatccatatcgcgcaacattgggccacgttttagaccagtttgagaaagccagtcaggcgtaaaagtatcatcagctggacagctttcgagtaccagacaaagatctggcttaacttttctagccgttacataggcgccacgcaagccaacttcttcttggctagaaagtgcagccaccacgtcaaagttagtttcttcacccttcaaattatcaagcacatcaaccatcgcaccagcaccaaaacgatcatcaaagtctttaccgaagaataaaccggacttttcatgatattcacacttaacatcaacaaagatagggcaacctgtatcaatcttgtagtccttgattgtctcctcacggctagaagaaccaacatcaattgacatatctgccacatcaggtacattattgcgctcagctgctgtcatgaagtgaggcggcttagttgctacaacgccagggatatattctccatcacgattgcgcactttaacgcgcaaggctggaatattatattttacccaaccaccaagtggaacaaacttaattaaaccattagggcgaacagcttgcgtaatgaagcctacagcatctgagtgcgcatcaagttgaattaccggtcgatttcccttattttctttcttggcggcataaacattgagcatcccatctacctcaatatctgccgttttttccgcataactagtaaacagcttaacgaattcttcctcaaagcccgaagttgaattggcatctgagaattctttcaacatttggatttcttgttctttttgcataatttttcctttctataaaaaacgcttaatttaattttaccgagaaaaacagtcaaagtagactataattaaaaataattattgcaaaggaaaaataaaatatgaaaaataaattttcaatgataattcttttacccctgctttttagcttatcagcctgttccaaccgttctagtcgtcccgctacggttaacgaaacagtaagtagttctgcgacacataaagcatccaaacaggcaaatgagtttaagcctaatttaaaaaagaaatatcctggctttaagttaaccagcatccccgaacaatttcgcggtacctggtatcgtagcgatccactgagcaaatcagctcgcaaattaattatcaacaagcatacaattggtgactcagcagtttatcgacaagtggataagtccattaaactagatcataattctgagcaaaagaacaagacctattctggcggtgactccatgattgccatcgaacaacatcaagggcaaacttggatgcgcgttcgtgagtttttgacaactgtagatattatttatattactggtcaatttaaaggacatccttgtttatatcttgcatattcctctggagatatccacaatgcactttttaaaaacaaagcgctagcaattaagtataagacctatgacttttctaaaattaaatcatgaaagatattaacaatctactacaacaaaaaagtaacttactcttaaaaattagttcgttacccctaaatctatttccttatttagtattcagcctaattattaaacaaaatactacaatcaacgtgctaccctttgcactcttttacgcttttcgtcgcacaacattgtttttatttaaaggcggcgaaaatgaagataatgttattggctggttcggtttattggcagctttattaggctatttcttagggattttcgggatctttttaccagccctttactgcattagcgcatcccttgccggaataggcgccgcatgttttcctagcgttcaaaaacagatcgccattcaaagcgactatcatccaagcaagaacgatctttttgcttattttggcgcaattttaattttgctagcaacagttgtctttgttgaaccacatctgccagcgatttcatttatcgcaatgctcatttatacgctaattgctatacttggctttaaatattctccatttagagcacattcacgggaaattgtattgcagtggcaaaatgtctggttaactcttggtttgctactggctattctcttaattcgagaaggttggaactcgggaaaagacatcttctctatttttggcattatcgtttcaacagtagtcgttattagctatctgatcaaattagctttaagccaaaaacatggtaaattatctcgcaaaatgcagtatcgcctgacaatcgcaggcctctgccaagactttaccactatcttttcagccgtttatatttctgttttatttggtgcaaaaaattactactggttatttgtcattatcttaatcgccagctttatcaaacgtccattattaaaaacgctacgtgaatatttaccatttgatgacttcaccattcaaagttggggcattgttctcggtctagttattacgctctttaggccaacatactttgcagggatttttttgattcgaattttctacagtttacaaaatactgacaccttagatcttatccgtgatcatgtcgatacaaatatttatatgatcaactatcgttttcgcactgctggaggcttcttaactcaattaattctgtggggtggcttgcttttattcaatggaccgcacatctttgagcaaatctttaactaccatattaataaaagcgttatgaattctagtcagcccttatttttaactcacttaatcttggtgctattcataatcagctttacaatttatactttaaaacttaacaaagggaataaaaatgaatgaaaaacctatttggaaaaagaatttacttgtcttatctattgcggtctttatcgctggtatcgccttctctgaagtaatgccgtttctgccattatatattgatacactaggcaattttacccataagcagttaaacttttggtctggctttatctactccggtacttattttgtatcggcgataatttctccctggtggggaaaactagcagacaaaaaaggcagaaagccgatgacattacgagcttcattgggaatggctatcgtccttggctgtatggggctagttaccaacgtttatcaattatttattttaagaatgttacaaggtatttttgcaggctttgtttctaattccaatgctctagttgcgactgaaactccgaaggaaaaatctggacaagcacttggcactatggcgtctagctttactgctggcaacttactcgggccatttattggtggagccttagcgtctattttctcctatcgcgttaccttctttattacaggtggtctattattaattgcatttcttttgtcattgttctttgtccatgaaacagacttcaagccagtaactgaaaagaaacttgataaagcaagcggagtaattaaagaattacgctcaccgcaattaatctttggcttgcttttaactactctaattattcaagctgcaaataattcgattaacccgatcgtttcactctatgttaaacaattgatggctaaccacggtaatgtcgtctttatttccggggtaatagctgctttgccaggaattgctacattccttgcggcatcgcgcttcggtgaactcggtgaccgaattggaactcataaaattattattgctggctttattggagccacaatcctcttctttttgactgcttttgtacaaaatactgttgaacttggtattttacgctttttagtcggctttactgatgcttgcttgttccctcaagtgcagactttgcttactaaaaatacgccagcaaaaatcacggggcgaattttttcttggaatcagtcagctatgtatatcggtaatatttttggaccgctactaggttcaactatctctggattaactaattacagtaccgtttttattgttactgctggaattgtcgtctttaacttgattttgtttaaatttaatgtgattaaaaatttgcagtaaaaaaagtgtttgagtttctctcaaacactttttctctattccgcagctttctttgcttcatgatgattataaataaagtttgcaacatacccacaaataattagcaacaacgatacaatcataattgctctgattccagtatgaaaaatagttcgcattgttggcattaacgccttaggcaaactcttcgcagattctgcgtcactcaacttattcatcatggtcatcgtaatattgtggtgtccagcaattccacgtgctagagctaaattcataatcaccccataaacggcagccataatagtttgcgctaaaattctaatcaaaaaactaagcgatgtagcaggtgccatatccttttcaccagcgtcaatctgcacttttatttgaagaataacgaagattgagcctacacctaaaccagataacgctgcaatcgacatcaaaatctgatatggcgtactaatcggtacaataattaaaccgattactgttattgcaatcaatgtaaaatcgaaaattaacaaatgataattattaaaatgtctgagtaaatgcggcgtactttgtgaaccagcaatatcaaagattgagttaggaatcaacgtcatcccaccgattaaggccgttgtccctaagattgcctgcgaccacattggcaaataagtgttaactgcaatatatgcaccccaggcaaaggcaaaaagaatgaagtcaccaactaaagctttattagtaaaaaccgataacggcacgataggactagcagcttttttctcaactaagatgaaccagacaagcattacgatcccgataatcacgaaaatagccactagaaaattactagctagtcctaacatctgaattccaatcaaaaagcaagtcaaaccgccaattagggtaaaagcacctagtcggtcaaagacagtattgatgtttggcttacgaatgccacgataaaaaagaaaactcaagataattgatatcaatcctaatggaacattgatataaaagacccagtgccaggacaaagcatcaacaatccagccaccaactagtggaccagcaatacaagcggccgaaaaactagctgcaatataactcaagatgaccgtcctgcgtttgatattcggataaatatagccaacaatcacataaggaagagaacccattccaccagcaccaacgcccatcagcactcgagaaataaggaaaaagtaaatatcgggagccactccttctaaaactgaacctaaaataaataaggctagtgacaattcgaaggcaaatttgttacccattctttcaccaattttactccaaattggcactgagaccgacattcccagtaaaaaacaggcaacaatccaacccatatactgaattccgtgtagatcggacacaattgctggaatcgccgtattaataattgtcgcatctagccctgacataatattagccagcaacaaagacaaagtaaccattgatatttgcttcttagtcatttaatcccacctttttaactctaaaaactactattactcatagtatgcaagatttaactagcaaaataaagcacaatatttttccactaaatcttgacaatctgtgtttttccgagttaaatataaagaaaataatagtgatgacctttaaagttagtcccgtgaggctaagaaggaaatctgcacaagctaatactttttgttgttagctaatacagaaggaccatcttgagccatgcgctcttggtggtctttttcttttggtcatccagaaaggaaaaactatggcaaaagaaataatcgatgctttaagcatgaaacgcgccttgatgcgaatgacctacgaaattgtcgaacgcaataaaggtactaaagatcttgtattagtcggaattaaaactcgcggctggtacttggctgagcgaatcgccaaaaatttgaaaaacttggaagatgttgaagtccctgtaggggcaattgacatttctcaataccgcgatgatctaccagaggctgagaaggaaaagatgatccacagccaacaacttgacttcgatatcaccgataaaaacgttatcttagttgacgacgttcttttcacaggtcggacaattagagctgcacttgatgcattaatggatcaaggccgtccagctaagattaatttagctgtcctagttgaccgcggtcatcgtgaattgccagttcgtcctgactttattggaaagaatatcccaacggcaatgaacgagaaggtcaaagttgcaatgactgaagtcgatgataaagatagtatcgaaatcgttaaataggagttttttgaatgaataaaaaagaaaagtacagaaatccggaggccgttttagacgtctatgaaaagccggaattcggccaaggcgtactgctatccttacagcatatgtttgctatgtttggttctaccgttttagtgccaattttaattggaattaacccaagcatcgctctactttcatcaggaatcggtaccttggtccacatgctcttgacccacttcaaaatcccagcatacctcggatcaagttttgccttcgttgctacaatgcaagccttaatgaaggctgatggctacccggcagttgcccagggtgcgatcgcttctggtttagtttacgtagttgttgcgatcatcattagcaaaattggttcaggctgggttaacaaagttttaccaccaatcgtagttggaccaatcatcatcgttattggtttgtcactagcaactactgccgctaatgacgctatgatgaataattctaagtatgatttgacttacttcggtgtagctatcttcactttggtcatgactttagttttccaaatgtgcttcaaaggcttcaccagtttggtttcaattatgctaggaattatctgtggctatatcttatcctgctgcctcggaattgttgatttctctggcgtggaaaaagcagcttggttcacattgccagcacttgatgtgcctggaatcagctaccatttcaaatggtaccctgccgctattttagccatggcaccaatcgccttcgttacaatgacggagcacatgggccatattatggtattgaattcattaactaaacgtgactttttcaagaatcctggcttacacagaacgatgatgggtgatggtctttcaacgattatcgctggtttcattggtggtcctcctaccacttcatacggtgaaaatatcggtgtgttagctatgactaaagtttactcagtttgggtattagccggtgctgctgtttcagcaattatcttcagctttgtcggtaaacttgctgcattgatcgaatcaattccaatgccagttatcggtgggatttccttcttacttttcggaacaattgcatctaatggtttaaagatcttagttgatgatcaaattgattttggtgaaaagcgcaatatgttgattgcttctgtcatcttggttatcgggattggtggagcttacttacaactgggcaatttccaacttacctcagttgccctttccaccatcatcggaatgcttttaaactggattttgcctaagaaagcagctagtgaaaaagctcaagaagaaaagattaagcaagaaaaacaagaaggtaaaatttaccaatagatagaataagccattcaaaaacccgttagttatcgcaatgatagctagcgggtttatttttcactctcactttgcgcacgcaatgttgtaagttgcgcgaaagttggcgaaagttagtgtaagttagtgtaagttacgagagcaatagtatataatttatttacacaaataaatttaagtcatgaggtgacattaaatggactttttaaacttcaaagcaattacacaaactggtaattttaaaacaccatctgaaaatgaaaacatcgaatacaaagaagctagttggaaattacctaaatcattttgggaaactgttagctcttttgctaatactttaggtggaataatagtattaggcatagcagaagataagagtaaacatgaatttagtataactagtgtagacaatgttgaagacattgaaacacaaattttcaatgataataacaatatttcatgccttaatcgacctgtaattcaaaataatgatgttcagatctctgtttttcaaaataaaactattattcaagtaataattcattcagaaccctttaatacccgtccaataactgctttcggtaaagcatatatcagaaccggtgacggagatcgagtaactactaaagagcaacttaaatattttacagttgaaagtcaaaacgaaatcgatactcacttactcccttcgacctatacaatagaagatttagacgcagagaatatcaaagaatatcgcaaaataattgataaaaaaggtattattagcactaattctcaacttagtgatcaagaattcttatattcaattggtgttttcagaaaagatcgattaagtaattcaaatgaatatcatcttacagatggtggtctccttttctttggaaaatatatttcgataacagatcgtttcccacgttttcaattagactatcaacaatataatagcgataattctaccaactggaatgatagagtttctgcaggtgatatgaattaccctactttaaatatcttttctttttacaatttagttttaactaaaatagaagcaaatgttcctgatccttttattcaaggtagtgaccttagtagaacgtcctatcacaacgatctaatcatcgcagctaaggaagccctagtcaattgtttaatgcattcatattatgatggtatggtaggtgtaaaaattgtagatagacctagttactttgaatttacaaaccctggtactatgcgcgtaagtaaagaatcatttttacgtggacaatattcctccattagaaatactgaaatcgctagtttatttagacgaattggtgtctctgaaaccgcagctagtggcggccctagaattcttaatactgtattgcaaaataatttaaatgatcctgaaattaacattgattatgaaatcaatactactcgcattcgtatttttaagacttttgcaattgataatcaggaaaaattaactgaaccagagaaatttattatgtcttttgctagcagaaatcctaatttttcaataaatgatattgttaaagatccgcagaatcattttggtaaacaaaccacgattagaaaatatgtaaattcattagtagagaagcatttactatccaatgagaaaattggcaaaaaatatatctacaatttacagaaaaacaatgattacgcgtggtgctagttaaatcgttctagacaataagccaaattataagctaaaattgcaatttccaaccggctttgaaagcctatcagactacgtgctcgattgttctcggcattgtaataggtcagaagcgaaaagtcgctttcaattgttctgcgaatagccatcaattgatgatcattgtgctttttagctcctgtcatatttttacgatatggtgtccaaagttcataacccatttgttttagctgttgatgcagttctttgcctaaatagccttcgtcgccaagaagatagtaattagatggatgggtattttccagcagttcaactgtctccctggcatcatgaactgatgcttttgttacgacataatcaagaatgtaaccgtcatcgctaacaatgacatgaactttgaaaccatagaagtaaattttcttggtggccttataaccaatgttggcataaccgcgaaaaattttagcacgatagttgcgaattggttggcaaacaggtaccggaaagctgtcaatgatcaagaactgtccattcaggtcaacctttttattcatttcttgccgtatctgataaatcaattgcaatagctgacgtgaacgtcgattaaaacgtgagtgtgataaacaattgaaacattcacagaatcttctttgtgattcaattcctgtcttagcttgccagataagtaaagccaaaatcagactgtccgtagttttaatttgatcaatatttcgccgatgagtaaactcagccggtgcatacaaacgataccagtgccgacaaattatcactaaatctttaaaactaacttgtaaatggtggctaaaacgcttaagcttaaggcagttcaatcagatcaggctcttttctattattatacaagttgagtctagtccgcttggacttttttattaactaaaacgatttaactagcaccacgcgtaatgattatctaaatcgcgttaaacaccttaaacatcttgaagataatttactcaaatagatcattcaaaaagctcaacctacaaaattatgtagattgagctttttcatcttatttatcttcaaatattctaggcttatcgtcatcaagtgaaacatgcggaatttcggtgttatttgtctcaacttgatcgttctcagacaattctgccttcattaactcacttttggctttactagaagtattgcctaaaagtaaagttttctcctgcggcgtattcaccattgcctgtttttctttgaattttttataaacaaccgccgctactgcaccaatagctccagcaacacctataattgtgccgattaatctcatctttttcatagggatcacctcgtattttgaaatcactttcttatccttaattatatctaattatgaggttgaacacatttttaatgcctattacctaaaactttccgcaatttctggatccatctcatcttctaaaacgctatacccttgatccaaagtcttgatcagagccatatcgtcatcatctagttcaaaatcaaacacatcaaagttttccgctaatctctccctatgaactgacttaggaattaccacataatttctttgtaaaaaccatctcaacattacctgagcagtagtcttatgatgcttttctgcaatcttttgcaagacaggattagtgaaaatgtggttggctccttccgcaaatggtgcccaggcttcaggttgcacgccctctttttccatatattgctgtgatttccattcttgattccagacattagtctcaatctggttcacagccggctttacatcattaaaagtaatcaaatcagctaagcgttcattccaaaaactacttacaccaattgccctaatgcgtccttccttgtatagccgctctagagcccgccaagtaccatagtagtcgttatatggcttgtgaatcagatacaaatcaatataatctaacttcagctttttcattgaatcgtcaaaggcttgcaaagtctgatcatagccatacttatcgacccagattttagaagtgacgaaaatatcctctcgtgggatgctgctatgcacaagtgcatctccaaccgcctgttcatttccataaatttgggcagtatccacaagtcgatagccaacttctaagccgttttccacaacttgttgagtttgagctaaatcatcaatttgataaacaccaaaacccaagcgaggcattttgacaccattatttaaaattacatagtctttcatatttcttctcgttttctagttagttcttgctatttaattttattttaacatagcccatgaaatccgactttattttttgaaacatagatattatttcttaaaattaagtactcaagaaaagcctaaccagcatccctcaacggaattgccagttaggcttcttttatttttcaacttttgcttgataaaatccaaagctcatctgcttcaacattctagtaaaactatcaatgtctagctttttaccggtagtcaaagcttcaaattcaccatcaggatcaaccaatttgcggtcagtcctgtgaaatccatttctttcatagaatttcaggcgactaacacgctgcttataatttttcgccttcttggtaactggctcaatatcaatgacaatttgcttatcagggaatcgatcctctaacatcatcaagatcttggaaccataaccttgtcctcgcaatttttcattaatggctaaataggtcaaatagactgtattatcattctcagcataataagtaatgccgcaaaactgaccatcattataaattgcgtgaaacttaacatttcggtgtaatgacattgctaaaagagaaaacatggagaatctttcccaagctggaaaagccttcatatataacttcttagcgtcacgatatgcttttgtgccccatcgggcgggtttagagtctaaaatagtatccttcttttctaattaaaaattgattgttaataactctgaataatattattatacaaaaaaatttgatagtttcttaaaattattttatatccgttcaagctaatctaattcaaattagtttaatttctacctcaactttaacctgtaattcaaattaattttaatctcttaagacttttgagataagttttaagttaacttgaatttgctgaaaattttactgctagatttaaataaaaagaaagcttgtcatctaaccaatgtcattaagttaagacattgacaaattatcgacttggacttttaagatcattcatttgtgatttatcgcatttgaatgatcttttttcatgccaaataaacccaaattttgtttagaaattaggctacacgatataaataatatacagctgatttgggtttgagatttcttttgtcttttcgtcctggtctgatcggaattgtgtaatgactaatttgaataagaatctttttaaagatttcagttgaagaagaaattatatacatagcctggatgacaaaacatgactgtttgaaattgatcgcatattgatacttgcattttttttgtggtacatatgcttgagcatcaatttgactgactgcgttaaacataatcatgtgggcatagatctccatttcaataaatctatcctgcttggaatgaaactgtacgctacctaaagcatatttcaactttttgaatgaagtttcaatgccccagcgcaaatggtagatctctttgatcctttttaagggataatcggctctatttagattagttagaacaacttcccattcttctttgcctgatttaggatcattaattctaaatttacaggcacgaaattttattgtacataactctccaaagtcccagctgccatctttggtatttttagaccgatattttatatattgacggtaatgatggttaaccaaatgaacgttttctgtagccttatgggtttcataataataattagaggtagtcacccagcaagctatatccttatcacactcttgattaggcaactcagctacttccttaaatgcgccatatcccgttttagtacgtatgacataataacagttaggcaggcgattacaattttcaatcatgttaaagccggtataacctcgatccatagtaactatatatggtccgcaatttagctttttaagcatttgaacggcggctttacgttcatccatctttgacttaggctgaaagatgcagtcttgataagtattatttaacaggtcatagagtgcattaacatgaatttggcaatatggctttcctttatgattgagatttccaacgatattctctgatttaggattccagatttgattaaaatcagacccatcaatggcaaatatacgatatttatgatcaaataactggatattaaataaattctgattaaatacagttagaatatgcttaaaacatgcgggtgaaagctgacctttgcgttggacataagcggaagtactgactactttatcgttatttttaatagctttttggccaaaagctctaaacaactcactggtcaaatcttttccttgcatattaatagtagttttaatgactgtagctgcatctaaaaaccgcttcctagtgaaggcatgaggatcatcgataaaatcatgaatatgctttccctaagtgtataattttttacggtaagttgaataaataattaaaaaagcccaagtcctttgaatttggacttgagctcaaacaaaaagaccagtagtctgatgttaagaacaaaaaacacattagaagctggtcttttatgaattcaattgtaactgaaatcgcaaatattataaagtctgaagataattatattaagcgtgaaagaaaaataatctgtttcttcttaaacctgattaaggaaatcatggccttggctttagctaaagttgatgatgaaatgattaccaaggttaaagcacagggctatcagattgataagaagaatgagcgctcaatcaatatggcttttggcgaagttaggtatgtcagaagaagatatgtctgcccaggcaaacaagcaaggtatcccttggatgaattaatgggctttgacaaatacaagcgctacagtattttagcagtcaaaaacatcttagaagtaagcagcgttgccacttatcgcaatactgctctagcagtcaattgcctgtctggctttaatattagccatatgcaggtgggcaatttggtaaaaatggccgggaaaaatattaaagcgggccaagaagcagattcaagatatgatgccgcaggcactaagaaaaaggtcccagttttgtatcttgaaggcgatggcgtggtgatcaaaggcactaaaagccggttggaatttcatcgctatcaggtctgtgaaggcattgtcaatataagcaagaaacgcagaaagcgaatcaatgccaaggaatttgtttctttaagccgacttgatgcgctgaacgaagccaaggagtacctggccaatacttatgatctttctgatactgtaattcttagcaacgccgatggcggtgctggatatgccaaaacagacttcgatgacattgtagggctatgcaagcgtcatgagcatttcttggatgtctttcacctaaataagaaaatcaaagaaaggctatattttgcgcctgacctgcaaggcaagctgatttctgctttggaatacaaatacagctatgacaaagttaaaactatcctaaccactgcagaaagccgactaattgatgaattgaataccgagctcaatcatgattatctggggcgcctaaggaattatattgatcgtcattgggacgatattaagccgtttaagaaacgaaaactgactgtgactaaagccattggctgctgcgagagcaaccaccgcaagtatacctaccgtgttaaggggcaaggcaagaaatggtcaaaatctggagcagaaggcatgcttaggatcttaagctgcatcaagaatcgagagctggaattttggcttagcagcgagtttgaagattcagaaataactgtattgactgaacaggaattaaaagcagcggcccgtgacagcttaaagaagcgtcatgaagttcatttaggcatccagcatggcgcattaaccgcacaggtagctggcaatagttatttaagcaagctaagcagaaatttaagtcatataaatatttaagaaattaaggttagactaatggtttaaaggctaccgcaaaaacattgacacttacatgctttccagtatcattgataatttgatcaagacgatctaaaatatttctgtgaagggctttcataattaacaccagctttctggcaataattttgaaggtttaataatttaatcagagggcgaaaaggtaggttcttttcgcctttattttatgcaaaaaaagaaccaaatcataatgattcggttctacagagattagattcaatttgtcaatgtcttaacttaatgacattggtcatctaacaaactttcttttttcatataataatcgttaactacatcaacttatatttcttcatcaattcttcaatatatgtgcctagaagttttatactgaaatcttgttctctctcaactttgatataaatttggcttccgcgccaaatttaaggatatgcaaagaaagacgcaattatcacatttttaattaaatatgagttaattgataatgagctgcaatttgagaaactttgcatttatcaactatttctgattcactcatgttttttattctttcatatggcatcaataattcaccggcaaaacattctgcttgccattctggatttttatatattggaatttctccatttcttctatatagagtcagtgaagaaggttgatgtaatataaggtgtagcaactcatgtgctattgtcattctatcacgtccaacatttctaatcgctcccatgtacaccgattctttaataagaattttatccttaacgatatcagtttgtgcctgaacatcatattctaattcatcattgtctacaatttcaaatgaaaaattaggatctaattctgatattttttctagtacacgcgtaatatcaatataaagttgacaaggatttatccctaataataatcgtacatctctagctaatgctcttaaatctttacgagattctggtttaacttcaaatattgaatcataactaattatgtctctcaccttctttcaaaatcttctgaatttgagctatttgtttatctgtcaaatcatcaaattttcttgcaaacatcaatgtagcttcctgcttttcaggtgaaaatttagatatatccaagctttcttcacttatgctcaatgcatcttttagctcttgttcttgctctctatccaagttatatctatcaacaatattattaattaatgatgcggaagccttcttatggccattttcaacaccagataaaaaagccgagcttaccccgacgttttccgccatatcataaagtcgttcatctcgatctaccctaagttttctcaaaaattttcccagtgctgtataagtcatagtttactttctcttttctaatatttactttctaaaatctttattataaataatctcattcactgaaagaagatcatatcttttaacatttaaataaattatactattactttcttttgtatcataagctggcaaataaaacagatcaccaacggagttaaaaacctttctaaattttacaccacctactttctcttgacctataactttaaattttgtcccagaaacagaatcactcaagtcgcccaaaatactaattctacaactatacctgttgcctgtttttaaaaaattgaacttatcatctcctaaaatatctgaatcatcaaacacagtataactttgattcgttttttgactctcaagaacaagatctcgagtaacttcataattaatgatttttgttaattcatacatagtattttatgcctttccaatcggataaaaactgacgatataaccattatctccatatgctattaaatatatcattccattgtgattatatataaaaacatctgctagctgtttaccttcttttctacttatatgtttaattggctttaattgaagaattttctttgcaagcaaaggaatattagtgtttgaaccaaaatcttttccatgccgagtttttatatgcaataacccactttttaagtttcctttctccagccacattaatttaccagcatagtttttcgtaatcatcactatatctgatttattatacttagcattactgttttctaattcatgcatcaaatctttaggctttagtcgttcttttgcaccattagtattaatataccctttataaccacttcccatcagtaagcctccttagcaaaaatttcttgccatgagggatatcttataaatttaatgtttcttttatatggtccaaaaatatcatcgggcatcgtaccataaaccaaaacttttttgggtctaactttttctagagcaatttctaatccagcttcaaataatattcttttttctttatcagcaatttgcccatatgtacccactgaacaaacttgatgcttaggaattccctgaaaaacaaaatcatatgatcttttatcaccccaacgtaaatttggaataatatttaaaccataattttgtaactctagagcaactctatttttctcatatacagcaaatttttgtaacactaatggttcgtcagcataaatgctataatcaggctggactacagatcctgcttttaacaatgatggaacaagtttagcaattctttcatcctttaatttagattcaaaacttttatcccattcatagaaacaaatagcatcatttaatgacgctatttttctgtcagaaaaacgaatcatttgaaaagggatcactaaatcttctttttgcttattcagtactgggtattcatcttccccagtaaaattagcattaagtaagttggacaatattatctcctcacattctactaaaaatcgaagagaaacatggtacactaaatatggttacagaagtatacttgcttctcttgcagcgattgtttcagcaatcgctgtattttatttctgttttcagttaatattattaacttatttagttaatttgtcaaatataaaaagaaagtctgtcaatctaacaaactttcttttttcataaataatcgttaactacatcaacttatatttcttcatcaattcttcgatataagtgcccttaaccttcttaagcatccctttaattgcaaacttttcaggcattggcaaatcaagatcagccaacttcttctggtcattcaggtaatacatcgcattcatcaacattctgacatcaaatgcggaagcgaagacttctggtacaccgcggtcaatattaagcaaagtgtagacagcttccattgccgtccgaactgaatactctgtcgtaaagacagtgtctcttggagtttcggcaaagttaccaataaaggctaagttcttagaatgatctggaacaacctttgggcggtcgcctaaagctcttggcataaagtaagaagtaatatatggcatgtgaaccggaattgttgtagctgcggcagctatttcaggaattctttcttccggcacacccatgtgatagagccactcttcacacatttcaagcccattacaatcaggcatcgtcttttccacataattacctttggtatcagagaacaaaccatataaccaaacaatcaattcatttggtttttgcgccttaaagtgtggctgacggctgattgagtaacctaatagccaattagaatccttaatagtagttggtccactagttacgattgagccactgtgtggatcctttttattaacagcttcaataaatggcacaacatcatcattcttaaaggtaatagttgcagacatccgccagttagcctttggaatatccttgcaaaagacatcaggatggccaaagtcttcatcttgagctgctaagttcttccacaatcgccagcttgcacccaattcatgttctgctggagcgggatgcagttgatctccataggtagtactatcagtaattgaaccattagtaacgaagactaagtcatttggtgttaagtcaatggtcttcttttcgccatcttcggttaaaataatttgtttagcaaccttttcgccgtcagagcggttaacaaagatattatcaaccaccgtattatagtggaagattacaccacgatcctttaaatacttgaccagcggcaaaatcaatgattcatattggttatacttggtaaaacgcaatgatgaaagattcttcaaggttgctacatgctgtacaaagcgcatcaagtagcggcgcatctccatcgcacttgcccatggttcaaaagcaaacattgttgaccaatataaccaaaagttagattcaaagaattccttagtgaagacttcattaatcttcttattttgcaagtctttttcgggagttaaacaaagatcaacaatttccttcactgcctttggcgttaataaaagttgcccatcagtcggcaaagcttgaccacgatttacaattactctagttttagcataacttggatcttttctatttaaacgatagaaggaatccaaaatagattcaccttcatggtcaggcgaagggattgatctaaataaatcccacaaacattcaaagtgcggctccatttcacgaccgccacgaatgatgtaactttccttttctttattatagatcccatccattgagccaccaggcagacctaattcttcaaaaatgtgaattttctcgcccttcatttgaccatcacgaattaaaaagacagcagtagctaatgcagccaagccactaccaacaatataagcagatttttgatcaacatctttaggtttatcagccttaacaaaggcttcataattgccattactataatgcataattgacacttctttcaataatcgttacacttgtaactatttacgcttataatataatgtaagcgatatcagttgtcgaacattttacatttggggatgatcttgatgaatatgaagagtctgcatacgcagcaacaaattgaacatgcattattcaaattactacaaaaaaagccttatacggagatctctattgcagaaatcacccgtaaggctaaggtatctcgtacttccttttatcgcaattatgaccaaaaagatgaagtcattgcgcaatttttatttaatcaataccataattttatcgctgatattgatcaacataatttgagaacttttaagcagcagcttactgcctaccttgaattcttcaaagataatcctcaactaatgaaattactgcttgatgcaggatttgaaagagaattacttaattttcaaactaaatatttgaaaaagctgatgtcagtttaccattctgatgtccacctgcccgactatgcaatagcctatcaatctggtggaatctatatgctgttagtctggtgggttaagcaaaattatcagaccagcttgactgatttaatcacttatgccgaaaaacacattatgctgtaactaaaaaagaagagctcacaaatcgagctttcattttcaaaattattgcaatttcttgcattttttaccaaagttaaagtagaaattcattacaaaggcgataattaacaaaatcaatgaaaccaacataatttccttaataccgccgtggaaaatagttctcattgttggcactaagttttgcggcaaactcttggcacttcgcgcatcactcaatttattcatcatggtcatcgtgattcccttgtgcgtttgaactccgctggccaagttcagattcataattacgccataaacagcagccattactgtttgagctaaaattctgatcaaatatgaagttgaagtggccgttgccatattctttagtcctgcatcaagttgtacctttaattgcaaagcaacaaagataaagccaaccccaatgccagaaaatgcaccaataaaggtcaacatctgcacaggcgtatgtatgccagaaataaacaaaccagctgatgagataatcatggcaactattccaatcaaaactaatttaaaggttgtcatatgctcctgaatcgccgctacactttgagatgcgataatttcaacaatcgaatttggaattaacgtcatcccaccaattaaagctgacaagcctagtaatgcctgagcccacattggcatataggtgtttactgctaaaaaggcaccccaagtaaaggcaaataataaaaagtcgccatctaaatctttatttttaaataaagaaattggaataattggattgtctgcatgaccttcgcgaataaagaaaaagacgatgaagactaaactaattataatcaatccaattatgatccagttagcggttaaaccaactagttgcacgcccatcaagaataaaagcagtccgattactaataaagtagcaccagggatatcgaaaaccggtgtcttttttggagtaaccggtttgtagtaaattaaacaaatcaaaaatgcgattaagccaattggaatattgatatagaagacccagtgccaagagaaagcatcaattaaccaaccaccaacaagtggccctaagatcgcagccccattccagctggcagttaaatagcctaatactttggttctagttttaatatttttaaacacataaccagcaatgatataaggtaaagaacccataccacctgcaccgattcccatgataaagcgagagcacagaaagaaaataatatttggcgctatcccttgtagagccgatcccaaaacaaagagtagcagtgaaagctcaaaggctcgtttgttagtgattttctctccgatcttggtccaaatcggaatcgaaatcgacattcctaataagaaaattgccacaatccaacccatgaattgaattccgtgcaaggccgcgacgatggctggaatagcggtattaataatagttccgtctagccccgacatcacgttgccaagcatcaaggctgccgtcaccattgtaatctgttttttattcatgcttaacttctttctatggtatgtaaaaagcgttagacaaaaatttctaacgcttttgagtaaaaaaatatggaggatacagggctcgaacctgtgacctcctgcttgtaaggcagatgctctcccagctgagctaatcctccattatggggcggaatgtgggaatcgaacccacgcatgctggatccacaaaccagtgtgttaaccccttcaccaattccgccatcaacggtccatatgggatttgaacccatgatctcctccgtgacagggaggcgagataaaccactgctccaatggaccaaactagaggaggatgtgggatttgaacccacgcgcggcataaccgcctaacggttttcaaaaccgtccccttaagccacttgggtaatcctccatagccgaacagatactagtataccaaagtgagaagataacgcaagaccttttttaaaaaaaagcaaaaaaataaagcctttcggcttcattaactatgtaaatttttctggaacagcaaatacttatattctttgccagcaatttcaataaaacgttgagtagcaatattacgccagccaaagtgcttaaagaattcttgtgcatctttatcttcagccagacaccacaagtaaatcttgccatagcccatcttcttcagttcattttctgcggcatttagcaaggtcttacctacattgtagccttgaaaatcaggtttaacatataatgccatcaactcaccgcagccaagcattctagtgtcacgtggacgaccatagctaacggctgcttgaacctcgttattatcgtctttaaaaactaaattatgacgaccactctcattgagtcgttttacccaagcagtagccggaatattatccaaaaatacatctggtagcacgcctttatacgtctcttgccaagttgtttggaaaagcttacttgtttgttttgcttcgtcttcactaattaatggtttaataatcatatttacttcttctttgtcaaaacagtcacagcctctacatgtggcgtttgtgggaacatatcaacaggatcgattcgcttaaattcataaccttgttcttggaacaaaagcaagtcgcgaatcattgttgcaggattgcacgaaatataaacgaccttcttaggtccagtcttaactgtcgcattaataaattcaggtgtcaacccttttctaggtggatcaacaaaaaccacatcggtcttcataccctttttagcccaacgcggcattatttcttcagccttgcctaagtaatactttgcgttttcaataccatttagctcggcattgtccttggcatccttgatcgcatcccggacaacttcgattccacgcacggccttcacatgcttagctacactcaaaccaatcgttccaattcccgaatatgcatcaattactacatcatccgaacctaaatctgcttgcttaatcgctaaatcatacaagcgcggtgtttgcagcgaattaatctggaagaaactttgaggtgaaattctaaactttaaatcaccaatttgatcagtaatctggtcattaccgaaaactaggtaatcctttttacccaaaatcacattggtcttcttaggattatagttcaagactaaacctgaaaccttaggaatctggctaatctcagctgcaacacccatcatttgtgggaaatccttaacccggctgaccaaaataaccattatctcgccattagccttactacgacgcacatcaagatagcgtataattcccgtattgtttacctcgtcataaggcgcaatcttgtacttgcgcaacacatcacgcactgcaaccaatacacgatcaatttccggatcagtggtaaagaaatttgtcaaaggcactaaatcatgtgaatgtcgtctaaaaaagccaatctcaagttgtccattatattctcgcacaggaacttgggccttgttgcgataccctgtttgctcaggactaggcaaagtttgtcctacttcaatctcatctaaatgtgccttcttaagtaagttaacaacttgattacgcttgaattcaagttgcttatcatacttgatatgagctaaagaagcgagtcccgtttgaacccattgattcaacttgatcttaactcgatcaggactttctttttttatttcttcaattttagcaaaagcaaagttcttcttaacctttaaaatctttgcactaaccacttcacctggaagtgcattagtaacaaatacggtcattccctcgtaatgggccacacccattgcttcatacgaaagatcggtaatttctaaatctataatttgattctttttcatactcactcaaccttaaaaaaatagctctctattattataatacttgaccaatctttgtgcttcaaaaaataatcgactgctttttagaaccaactatcacccatatacgcatgcaaaatgtggttagccgctactttcaacctcaaataattaatattattagaaaatagcataatcatacgcttggtcttgtaattcgcaacaaagcagcaattataaccagggatactgccattagcgcgaatgatgtcaccattaaaatacactccaccaaaataagctaccgtctgatgctgggcttggtggtaatactcgtttaccattttaggatttttcagcacatcgttatatacaaacttccaataatcaattggtgacatgaataagttccctgctccaaagtccgacgacgtcgtcactgtcacttggtgccagtcaacatttttactcattggctgagggatctcgttttggttaacctcagaaaaatccttaactttctggagcttaagtggcttagcaaaatcggtctgaatataagcattataacttaaattagtctgcttgctaataatagctgctagcaattcataatcaacatcttggtaatcccaagtatgaagatgatcattctccatgtgattaagcatataagctatttgctctttctgatttttaagcggagaagatggtcgagcattgttaaccaagccactagtatgattcatcagcccatgaattgtaatatctttactacctgaaacttgaggataatagttagataaagaggtattccaacctaataacttttcttgttgcagctgataaattgcagttcctgtcataattttttgtagcgaagcaatcggaaacaattgattagcgttaactatttggcttgaatcagtggtctccttattttggacaacaatcggttgcccctttttatcattaattaacattacaccgttgatatgatgaaacttcatataatcatgcagctgttctttctgattcttaatgccattatccagcttatcccctggctgcacaatgaataaaaatattgcaaaggcacaaagtgccaaaaagatggataaagctcgttttttatgcataaagattcctcttaattactatcccaagcaatgtaataactatatttcttcaattgtaaatctagtatctaggaagactcaactatttggttaatttttgcatctaaaaatattttacttaaatctattgacatacttttttaatcttgctatcatattgctcaacaagaaacgaaaagtagcaactttgctcagcgttcagagaactggtggtagctgcaaaccagacaggcaaagtttgacgaaatacgtcgttataatgttgttcggaaaaattcagaaccgttaccatctgatagagattcaagttcttatgcttgaaagagtgggtggtaccacggctattgtcgtcccgttgacttaggtcaacgggattttttatttggaggaataaacaatgaaaaaagaaaaaatttcctttacagaatcaatcattatcctgatagctctattagctatcctcggcattgctgtaatcaaatttagtctctcaccagaagtgcctgttttatttacagtccttctacttactttctgggctagattacgtggcttctcctggcaggatgtccaagatgggatcaaagaggggatcggcgttgcaattattccaatttttatttttattttaattggtgctttaatcggaatctggattaaagcaggaattatcccttccattatggtcttaggttttcacttaattagtggcagcttctttgttccatctgttttcatcgtttgttctatcattgggatggcaatcggtagcggttttacgaccatctcgactgtcggaattgcgctttttggcatcggtactagtatgaatattaacccagcattggttgccggtgcaattatttctggtgcggtattcggcgataaaatgtctccgctatccgattcaactaacctttcttcagctgttgctgaaagtgaattatttgctcacattaagaacgtgatgtggtcaacaattcctgcatttattgtttcattaattttattctggattttaggcaacagtggtcacatggacctaaccaagatcgaacacacttctcgtattctccaagctaactttagcatcacgtggtgggctcttatcccgattattttaatgattttctgtgcatggcgcaagatcccggcaattcccaccttatttatgaacattgctgtcaccgttataatgatttttattcaaagcccacacgaatcaattcaatcacttaataatttagtcatgaatggctttgttgctaaaaccagtgataaagcagttgacgctctccttacccgtggtggaatttccagcatgatggcaactgtagcattaattatttctaccctatccttagggggaatgttgatgaaatttaacgttattcaaagtgccatggagccgcttgtaaagcatctcaagaaaccaggtcggttaattacagtcactattttgtcaggaatctgcatcaacctttttgttggtgaacaatacttatcagtaattttacctggacgtgcctttaaacctgcatttgataaaattaagctttcaccattggcacttagccgcgtgcttgaagatggcggtagcgtaattaactacttgattccatggggagttgccggttcatttgctgcctcaactttaggcgtacccgtcttacaattcttaccatttgtcttcttcagtctgctttcaccaatcttctctattttaagtggaattactggaatcggcttgaagtgggttaaagaaaagtagaaaataatcttgtgaaaaaagttcctaggatagttgtctttaggaacttttttacgcaatctattagaactcaggaataaataatgcaaattaatgaccacaaaagtaactggtagttagctgatattggtgattatcttaaggttatcgctaatggatgtgtcatgttacagccaattattattcttttcttgaccttaccatttggctattcgcaacaactctttttggcatcgctttataacctagtcaaatttacgtcaccagccttcagcaacatggtcattttcacaatgttgcttcatttatttggcaatttttcagtggcaatgctgcacctcatctttggtacagtgtcatgatgctgcaatttttacttattatgccttggattaaggctatctgtaactgggtcaagcattcttattgccgcctagcagttgcagttattagatcgtatcttcatcagctttctaatttttgggctctacggtggtttaagctggaactttcatcatgaaattcagacttttctatttaaatattggtagctaattgttggaatttatcttttaacttacttttggaccagagatttatttttagctacttccaaattaacagatctaaccaacgacagttattacctaccttcaatggcaatttatgctttagctgttatattcttgacttacctaatctgtattgcacaaaaagtctttaatatgaaccattggctaaaatcaattcattttctagctttttatgcttatcgagcatttttagccaatgttttttgggatcggatcttttggcaatattttaattttaaacagctagctttacaaaacatttatctagctgtcttactactctggatttgcacatggtgtgcttcatatttatctgtttatgtaattcaccaactttggcttaaaattaatgattctgtcgatccatcctaatttgcgcacgtcgatattcctgactgtcacgtgtaggttgagcaattatgtctgtaactattatttcatgatcatttcgttcaaagacgattgcctgatctaattccgcatttacttttttattgatagtggaattttgattaaatttcaaatcatcaagctcccgatcaataaatgctttttgcgagctggttagctgatgatatttatctgcagcagctttagtaaacgacagaatcattttacgattaaactcacctattttatccggatgctcacttctttgaccgcgcacatcatcatcaatatatctttttttcatcaaaaatcacttcctctatttttactatacaagagatcatttctattagatatttttctgcttggtttagttttttcataagaaaaacttactatttatcatttatgtcctaaatacggtaaaatagataggacaattaaataaaaggagtgtagtaatctatggataacttttctaatactccaggacggcgtcaagtccaagatatttctgcggttaacagtttcttaactaagatgtacagtctaatgattttagctgttttagtttctgccgcaactgctttcttgacgacaactgtatttgcttcagcaattgctaacatgtcacaagccgtttactggatcattatttttgttccaattgttttatgtatgactatcagctttaaggcagctaagaatccgacactaggtttagtccttttgttaattctttcagcagtctatggctttgaatttgcctttattgcaggtgccttcaccactgcctcaattgcgggtgcctttttatctgcagctggggtatttgcagcaatggcaatttttggtactgtaactaagcgcgatttaagtaattggggttcatatcttggtgctgctttaattggtttcttagttgcatggctagtaaatgccttctttatcagaagcggtgctgccacctttatattctcttgcattggtgtattacttttcactggcttaacagcttatgatgcacataatgctaagaaaatttatatgacttacggtggtcaagtttcagacaccggtttagctgtaatgggtgcgttaaatatgtaccttgatttcatcaacattttcatgttcttgcttcaaatttttggcatgggcggaaatcgcgattaatctataattataaaaatagcgttgattggcttacactaatcaacgctatttttatttgatgatttcttatcctttttaagaaaactagtcagttcatctagcggcgtcttatgcaaaaatgccataatattttctctcatatcataaggtgaaagacgatcactgtagtttaataaaacccgaactaaatcaatcatactattaataaatacttgaacatcaataagcattgctattctttctttaccggtcaatttaatcccttggctatcatccatactattaattctctcaaaaaactcatcacaactcgtatcaaaaatcaaattataaaaacgaatatcaccattatctgaaagtagcaattgaatttcacgtttatgatcaaaacaataagaaatagtatttttggttgctgataatactgcttttaattgatcttgtgtaggaagagtcatatcaatattagctagagattcgcgatcacgtctaatactatctttatatccttcgataaaatcattttcaacgtctgccactaagctattaacgtctgcataatattgataaaaagttctggtacttacacctgatacttcaataatgtctttgacttttaactcataaacacttttttcttctaagcatgttagcagagcttctactaagcgattcttagtattagttactctaatatccaaatagcacccaatcctttcatctcattattcaaacataacatccggtgaaaataacattttactatcgtccaaatcttttttactttttcaacctaactgtaatttcattgttttaagcaagatgcattcataaaatagtaattgaaaaatgtaattagtaggtgatataagatgtttaatcaaaataaaatcattatttttaataatagaaaaaataattgctctaagaactatactttacctatgcatgatcaaaaactgctaaagcaatttcaatcaagtctcttagatgacataacatattatccttttcatcctcttagacatataaataagacttttgttagattcatcagtacttcaggcaagcctttattcaacgattttgtctatcatttgcaaactcgtgaattaattttgaatgacttaatcttaattagttataagtacctggtcaggaataaagctaatattgcttactctgatctaagaaagaattgggtaaatgtatttaacttatccttctgtaccaacgatattaagttcaacaaggaagctttattaaacaaaataaatgaagctaacaagatgtaattattcctttaacttccacatcttattaaccaaaaagaaaaagagttcaagtttagattgcttgaactcttttcgtttcttttgcttcaatttattattgtcttttagttagcttagccaccaacataaaattcaatatgctgttgcaaattgttaaattcaactggacaataaccaccgatctcaccatcaagattaactggtaagtcttgcccttcacttttaccaatcaactcggccttcaggctacgcgttttggtataaatgatattgggatcatcaacatgtttaccattcaaagccaatgccatcaacttcatcatgctaacagggtcagaaggcttgaccacgatcaattggaataatccatcactaagctgtgcatcaggcataacttgctcaaaaccaccaattgaattagtcattcctagtaggaacattgataattttccttcataaacgccatcatcataagtcaaacgcatctcattctcagtcaagtgtggcaacatttctgcccccttgattaagtatgcggcataacccaaagctgacttaacctcagatggtacgccatatgttaactcagttaaagaaccgctggcagcaatattaacgaaatattgaatttggtcaccaaaaacagctttaccgatatccattttacgagttttattctttaagattactttagcagcatctggaatattatcacgtggaatggctaatgcacgagcataatcattagtagtcccagcaggaataattgccattttaggcctgttttctaaaaaggcaatcccgttaactacttcattgattgtaccgtccccaccagctgctacgattaaatcaaagccttccttagcagcacgagtagcttcattgcgagcactattttcttcaggtgtagttctaaaagcactagcttcgtagcctgcttgttctaatacatctaaaatatcggccacattctttggcatctgttcgtgacctgatacaggattataaattaatcttgcttttctagtcataattactacctaacgttctaaaaattaacgactttgcaattcttggttaagtaacttgttaaccatcttagggttagccttaccacgagtttgcttcatgatttgaccaactaagaagccgattgcacgatccttaccattcttaaagtcttcaacagattgagggttatcatcaacaaccttcttaaccattggagctaaaacagaagtatctgacaattgaaccataccattatcttcaacatacttcttaggatcagtaccattttcagtagtttcggcaaagaccttcttagcaatcttagatgaaatagtaccgtccttgattaacttgatcatttctgccaagtgttcaggagttaacttaatatccttcaattcaatacggtgatcattcaagtaaccattaacttgagtgttcatccagttagctgcaagagttggatctgcgccagctgcaacagcttcatcaaagaagtcagaactttccttagtttgaagcaaaacgttagcgtcatatggcttcaaaccatatttatttacatagtcatcgtaacgagcaaatggcccctttggtaattccttagcaatttcatcgatccattcttgtgaaatatgatctggtgcaatatctggttctgggaagtaacggtaatccgatgcgccttccttaacacgttccaaaacagtcttaccagttgcttcgtcaaaacgacgagttgaaagttgaatatgaccaccagctaatagaacttgttcttgacgcttttcttcgtaggcaagtgaacgacgtacgtgatcgaatgagttcaagttcttcatttcgaccttagtaccaagttccttttgacctgctggacggatggaaatgttagtatcaacacgcattgaaccttcttccatcttaacgtctgaagcaccagtaaactgaacaatcttacgtaacttttcaaggtaagcgtaagcttcttctggatcttccatatctggttcagaaacaacttcaagaagtggcacaccctgacggtttaagtcaacgtatgaataaccgttagttccgtgagtgttcttaccggcatcttcttcaatgtgcatttcgtgaataccgattctcttcttcttaccacgaacttcaacttcgatgtaaccatcacgagcaagtggttggaagaactgagtaatctggtaagccttagggttatcaggatagaagtagttcttacggtcgaagtgagtagttggcaaaatgtgagcgtgggttgcgatggcaaccataatacctaaacggtaaacgttcttgttaaccattggcaaggtaccaggcatagcccagtcaattacattagtctccgtgttttgttcagcaccatatgttactggtgaaggagagaaaatcttactctttgtctttaattcgaagtggacttcaagtccgatagtcgatttaaaattcattcaattagtcctccattccagttggtgttttttcataaaacttgttagtgcgttcgataaagtcagcagtcttgaagacattaccttcatcaaaacgcttagccataacttgtaaaccgacaggcatcccatcaactaaaccagctggaacactagctgcaggaatacctgctaagttggcagaaatagttaaaatatcattgttgtacatcttaattgggtctgaaacttcttcgccaataccaaatgctggctcagtagtagttggtccaacaattacatcattttctgcaaagatcttgtcaaagtcatcacagatcaaggttctaaccttagcagcttgtctaaagaaacggtcatatgaaccagctgaaagggcaaatgaaccaagcataattctacgcttaacttcagcaccaaagccttcagaacgtgatttaacgtaaacatcaagtaagttcttagtgtccttagcacggtagccgtaacgaataccatcgtatctttgcaagtttgaagaagcttcacttgaagcaatgatgtagtagtcaggaacaacgtatttagtatgtggcaatgaaacctcattgatcactgcaccagcatccttcaaagcatcgatttgcttttgaataacttcacgcatcttaccgtcaactgcttccatgtattccttaggaacagctacgcgaaggcccttaacatcttgaccgataaacttggtaaagtcaggtacttcacgggttgaaacagttgagtcatgctcatctgcaccagcaattacgtttaatacttcagctgaatccttaacgcgcttagtcattacaccaatttgatcaagtgaagaaccaaatgcgataagaccccaacgtgatacacgaccgtaagttggcttaataccaaaaataccgttaaatgcggctggttgacgaattgaaccaccagtatctgaaccaagtgctgctacaacttgaccactagcaactgcagctgctgaaccaccagatgaaccaccaggaactttatctaaattccatgggttgtgagtagcaccataatatgagtgttcagttgatgaacccatggcaaattcatccatgttggtcttacctacaaaggttacgccagcttttttaagcttagaaataactgttgcatcatacattggcatgtagttgtacaaaatgtgactagcagcagttgtcttaatcccgttagtgatgatgttatccttaattgcgattggaatacctgctaacttactcttggagtagtcaaggttatctgcaggcttagcatcatctaaaacagtgatccaagcatttaacttcttatctgtatccttaatgtttgccacagtgtctttagctaacttatctgctgacaagtcaccgctggcaagctttttgtttaatgaatcaatattttcgtttaagtaattcattactcgtcctcatccttattaataattacaggaaccttaatgtagccgtttgccttttcaggaacgttagccatcaatgtttctctgtcttgtccttgccagtgttcaggtttatcttctctgaagacagtatcacgatcaacaacttgaactgtttcatcaacaccctcagtatcaacttcactaagttgatcagccatattgataattgatcccatttgatcagtaaatttatctaattcttcttcattaaacgcaagtcgcgaaagagtcgcaacgtgtttaatggtatcttttgtgatttccacgcaaatacctcctattcgccgccataaacatggacttgataatcactatcgccggtttcttttgcaactaaagcttgtacatcatctactgaaccaattttgatttcaattgggatattgccagacaagtactttttagctgacgacaaaaccaaacgggtaaaactttgaatttgttcatagccataaaattgcgttgttacggaaatgttttcttgtgaaagcttaccgtttgtataacgcaaagttgccgttaccccactaatattagggaagtagttttgaatagccgtcttgaaatcattgaagtgcgatgcatcatcactgttaattgctttttcactaccagttgtcggtaaaacttgcattttttccgacatggatttccatttagatattttactactattagcggccgctgtcccgtaagcgaagtaagttccaccaactaatgaatcttttccagtcttggagaacaaaccaatcgtaatcggaatattctttaaagctttcttcttacgcaagcgagcaacaatttcattagctattttttcaccttgagctttttgctcagcacgtgaaatagtagtttgaaattctgcaccgttacgctttttctgataataatcaaccgaattcatggctaagcccaagctcataccacctaaattatacttggaaccagatccagtcaaataatcttgttcgataatttcttccaaataaattggattacgcgtatcggttccggtcttaccattatttactgggtttaaaccatcaggatttgatttggatttacgcattaaccaatcagttacagttgaggtatccaaatattgtccttcttggaagacgtattgattaggcgaaaattgattcttagaaatttgaatcagccctcgctctaattcacgcgtatcaacagaattatcattatcagtagctgttaatcctgcaatcggactaatattatagcgaccatttttcattaaaacggtatagccattcgttcccgtgttagtagtttgatagctttttttcttagtggttgaagtggttgtcgcattatttgctaaactagaatccttcaacttaccacaaccacttagagtaagcgcgattccagctaaagccattacttgcaaatattttttcacaataattgtcctttattcaatttgtgcaattgcttcttcttcagtcaaaagtggtacgcctaaagtctgcgctttagtatacttagaaccagcatctttgccataaatcacgtaatcggtcttatgcgaaactgaacccgtaactttggcacctaaagcttgtaattttttcgtaaactcacttctagtataatgctctaatttacctgttagcactacagtcttatccttaaatggattatcttcaatttctgcaggctcatctgcacctaggtaatccatattcaggccgctctcacgcagctcatcaattaccttctgtgcttctggttgagcaaaatatgttgtcattgattccgcgatcgtcatgcctattgtatcgatagaagctatttcttgcacgtctagagacataatctttgccagatttttaaacttttgagcaattaagcgtgctgctttggccccaacatggtcaattcccaatccagtaatcaataattcaactgagttttgctttgaattgtctaaggcagttaacaaattattgatcgatttttccttaaaatgatcgagttgtgctaaatcatctgcagttaagtgataaagatcagccacattatgcactaaatctttagcaatcaattgtttaacgatctttggccccaaaccggcaatgttcatagctggtcgagaagcaaagtgcgtaatgccctcctcaacttgagctggacaagatggattgatgcagcgcaaagctacttcatcttctaggtgaactaatttttgcccacaggatggacaagtcgttggaatctgataagctacagaatctgccgatcttttagccatgacgacttcagagatttctggaataatatcgcctgctttatgcagtttaacggtatcaccaatcctgatgcctttttcattcaaataatctgggttgtgcaatgaagccctagctacagttgtaccagctagttgcaccggatccatgaccgcagttggagtaactactccggtacggccgacagtccaaacgatatcccgcactacagtttcttgttcttcaggtggaaatttataagcaatttcccagcgaggcaccttaacagtgttaccgagctcttgttcaattcctagatcatcaatttttaacacaatgccatcaataccatatgttaggctgtttcgtttagctgtgtattcatcgataaaggcaaaaacttcatctaatgtttttaacttacgaccggtttcattggtatgaaagcctaaatcatgcattttttgaattgcttggtgctgactagtaatttcttcaggcggattaacccaagtataaataaaggtactaagttgacgcttcttggtaactttaggatcaagttgacgcaaagaacccgctgcagcattacgtggattagcaaaaactactagaccttgctcttctctttctgcattcaacttggcaaaggcttccttgcccatgtaacattcaccgcgcacttcagttgttaacggttcaggcaaagtctgtggaatatcactaatatacttagcattagctgttacatcttcaccaacataaccgttaccccgcgttgaggcacgaaccaacttaccattttcatattcaagcgatagtgataagccatcgatctttaattccacgttatattcaactggatgaccaactaatttttgcatccgttgatcaaaatccttcagttcagctttggaaaagacgtcccccattgacagcattggaatcgggtgctctaccttggtaaaatcactatcaatctgtcccccaactctttgggtaatggagtcgggtgtcacaatctctggaaattctttttctaattcaagcaagcggttgtagctttggtcgtaaacattgtcttcaacctcaggcgcgtccttagagtaataggcctcagcccattcattaagctgttttctaagtgaagccgcttcttttttagcttcatcaagagtaatttctgccatttttccctcctgatccaaatcaatctttctttaattatatcttcttaattggcgcaaaggcagccaaaagccgtttgattcctttaccagggaaagcaatatccagctccatatcttcaccagtgccattaactttagttacaacaccatgtccccaagctttatgctcgacttggtcgcctacattccagcccttcttttcagcaccgacagcgcctgaagctttcttagcagtataaacttcagcgcgagctcgttcggctttgcgagcaaatggtgccgtctgtttctcaaagctagattggataaagctgctttgtaatttttcattttcttctttgtgcagatcctgttcatcaatttcgtccaagaatcttgaaggcggattattttgcattctgccatacatcatccgtgagtaagcattagttaaaaacagttcttgcttagcccgagtaattcccacgtaagctaggcgccgctcttcttctaattcattgtcatccatcattgcacgttgcaacgggaaaagcccatcttccatgccaattaagaaaaccactgggaattctagtcccttagctgcatgtaaagtcattaaagctacttgattgtcatcttcatcaagatcatcttgatcgctaagtagagatacttcagccaagaagtcgcttaatggattagactcatcttcttcgggctcataatgatcatcaaaacgcttagtaactgacaagaattcatccaagttttctaaacgcgtttctgattcaattgtattttcagctcgcaaggcatcggtataatcaaaatcagctaagattttttcggttaaaccggttactgtaccattttgagcataagcaattgcatcacgtaatttagtaccaaaatcgcttaatttcttggctgctctagtattaattgaactttcagccacatgtcccatcgcatccaaaatgttgtagtgattctcatccgcaaatgttaacaacttatccacagtagcggcaccaattccccgctttggagtattaataattcggttcatactcatcgtatcagctggattagcaactaacttcaagtaagccatcacatctttaatttctttgcggtcatagaatttatgtccaccaacgatttgataaggaatattgcttttaacgaaagcttcttcgactgttctagactgagcattagtccgataaagaattgcgaaatctttgtaagcccgttttttatctttaacttcttcttggatctttgaaatgatgtagtgagcttcatcatcaccgctttgggcttgatagtaggttaccttttgcccatcaccttgatcagtccacaagttcttagccttccggttctggttatttttgatgaccgagttagctgcggacaaaatgtgaccagtagaccggtaattttgttctagcttcacagtcttaacatcatatttcttgtaatcctgctcaaaattcatgatgttttccatattagcaccgcgccagccatagattgactgatcggcatccccaactacacaaatattcttgtattgtgcagccaaagcatgacagagttcatattgagcctggttagtatcctgatactcgtcaactaaaagataacggaacttgttttgataatagtgcaaaacttcgctatcttttttaaacaaaactagggtctgcataatcaaatcatcaaagtccataatttgatcacggcgcaatctacgttgatattcttcatacaccttagccgccatcttctcaaatggtgacaatgcactctgcataaaagcttcaggatccagcaagtcattcttgccattagaaatcgcggctaaaataccgcgtggatcatacatcttaggattgatattcaagtctttttcaatatgcttaaccaaagttaattgctcggccgaatcagcaattgaaaaattatgaccataaccaatcttatctgcatcccgacgcaagatccgcacacacaaagcgtggaaagtcgacatccaaatgtcgttagctgctggtcccagcaacttttgttcacgctcacgcatttcactagccgccttattggtgaaggtaatggctaaaatattccaaggtgcaacatgattttcttcaactaaataggcaattcgtctcgttaaaacagaagtcttacctgaacccgcaccagcaacgactaataaaggtccttcagtggtttctaccgcttctttttgttgcggattcagaccagctaagatagatttttcgctcattattttccccttcactaaaaattatttcattaatgcaacttgaatattataccaaaaaagcagcgactaattcgctgctttagatttacttatcatatttttcaagatcaaactgttcaatcaaattaatcagcttatcggcatagtccggatcagtcgcatagccgtcggtaaccaaggctttagcttgtgtcttataatctttggatgctagaacatgcttatactgatcgtggttccacgttgtcccattctggaataatctagcgtgagcccgaatagaagcctcatatgagtcatatatttggaaacgcgccttcacggtaacccacttattctttacatattccttagttgtcatcactgccgaagtgttcgggttggatcctttaacaccaaaaagattgttgtatttttgcgacaaatcactttgtccataattactttctaggcaggcttgagcaatcgtgatgcttggcaataagtcatacgacttgtccacttcgcgcgcaatcggaccaatttttttgataaagtcttttttctgttttaatagttttgctgcttcctgttctttttgcagctgtgcttgttgaatctgctctgattgaatcgcgtaacgcctataatatctaaagccgacaaaagcaaccatcagaataaatagaattacgaatacacgcacaacggttttgacactttttggtactcttgatttacgttttcttgccatagttttattccctttaattactaattaaagtataaccgatttttgagtaaaaaaaagaagtcgctcactgcgactcctcaatcagtgcgggcgagaagactcgaacttccacgatctaaagcgatcacaagatccttagtcttgcgcgtctgccattccgccacgcccgcggcacatcaactataatagcctaaatacagttgagatgcaagaaaaaatataaattattttaaatttctgatcattttacgcaaaagtttgcgctaaacgcaggtgtcccctacatttaccacaacgatacttttgtgtattaatcctgcgcattcttgggtatctcaacccacagttttcacaaagatataggtaacgatattttttctttttacgtaagccaatatcaggtgcataacgactgcctccaacttttttcagcaagattttaaaattgcgatcacggtgtcggtaacccaagcccaataaatgcaaatgatagtgggttaattcatgcttaatgattcctactagataatcatgatattgtggtactaaaaaatgcgcgttgatttcaagatggtgatcatccaaatgataacgcccacctgttgtggtcattcgccgattaatttttacaaggtgcttaaaagggcgatcaaaatattttaacgaaattttttcaactaaattttgtaattcattctcattcatggataaaattttattccaaaaataaaaatcagcaagaatttaatctcgctgattttttgctacctaaatatcttggcatacatccccgcctgcttaggcgtactaatgtgtcgtttcaagaaagttactaagtcatgtttgaatgactttttaccatccatccaggttccagtgaataagtgaatcgatttggagtccttagaaggattacacagaactccatctgaatagacatgaatgccatcttttaacacttgctcctgattacctagctttaagccatacttatttaccagcatttcagtaacggaaatactatttactcccgccatctgattcttagtgtcatattcaaaatcacgatcttgataataatccaaaatatcctgcataaatgggtggcctttttctgcaccaaaaattgcagctgacagataatcatggttttcaaaaccaataaaggcagaagcattcaaaagactatctaacttatccacgactctaacatcagtatctaaatatatcccaccttgttcataaatagcccgtgctcgaacatagtctgacacgaaggcccatttttttgcagcataagcttgttcaatataacgattctcatgcatatcaaaattatcttcattccactcaataatttgataatcaggcaattttttcttccaggttgcaatacattcttcaattatcggggatttaggattgtgtcctacccaaacataatgaatttttttaggaatcatttttaacctcgcttcaaaaagttcttaattagcttcacaatatcatcattaaaatcaagcttgaacaagaacatcaatgtcagataaataattaacatgacaattgacttaaaagccatatcgaaaaaggcagatggaattatattaggcataaacattccaatagccaaggttagcaccgcaattaacaaatacttgggcacgtcatggaaaacataactaaattcatagccatcacgtacaacccagagccgcaaaattaaaactactgcttcagtaattaatattgcaatcatagccccacctgcgccatatggcctatctaagagataactcaagacaatttctaaaattgccccaataactactggcacagcataatccttgtctcgctggttagccaaagcaaattggttagcaaataccccgccagtcggaatcatgataattgttaaggtaaaccaaaacattaatggagtcatcggaacatatttattcccaaagaaaaatggtacaaactgtttggtatttgccataataattacggcgaacaaggtacccagcattacagtagcttccagtgattttttcatcactatcttttgtgccttttttccttcgctcgccatcttgggcataataactagcgaaatactggtaattacacccagaatcatatttgaaattcgttgtgaattgtcataaaaagaaacctgagtcgaattagaaaaccaacccaaaattggtttatccagcgaagtataaatttgagtcgcaatctgtggaatcatcaaagtaccaattgcaattgccgtctgtttaaatttgtaaaaatgagcaactggttttcctacatagcgccgaatatcaaaccaaaagacaaaggaacctaacattgtcgacactgacatgatcagtaaatatttccacaagtcagcgggtgattttacccataataaaattagaaccacactaactaactttaccgccgtgtttttcaaaacaacacgaccaaagtcagctagtccttgaaagaaccatgaaatatcaacctgtgctgagatcaagtatggcaccatcaacaagatataaaaccaatattgaacgtgaaatacagtcgctacaaaaaccgtgactaaaatggtgataataccggcgattccttgaaaataccataacccccagaaagcattggttagctcctgcggtgtaccataagtgcgcgcccgtgaaattgttcgcatccctacatacgacacagacagaatacaaaaaatcatcaagaattgcaccgtattgttcacactgctataaatcccataagtcttaggacctaagacacgcgataaatacggtacagtaatcagtggcaccaatacaataaaaatctgataaaccgcattatataagatgtttaaaaatgttttacgcattttaacctcgatattcctgcgtcatgtacttaaagacgttctcacaatatgaatcaccatgcacctggttagtcaaatgtagccagtaaagacggcgattagcaatctgctggttatcaagttgatccagattgcgaattagttcatcctctgaattaacacagattccgggagtaatctcagcatatggtcccattagtaatccgcgcgttttttcatattgctctaaaaagttagtcacaaacacaatcggtttgttcaagtgcaagtaatcaaagtagattgacgaaaagtctgtcatcaagaaatcagtatcaccgagcaattcgtacaaatcataattgtggtcaaacaagtaatcattgttcatgaaagcaatgttagaataactgctcttgaaattggcaaataagcgcatttcatagggatgcaattttacaatcagatattgatgccgcttctttaattctgtatttaatttttcaacatcaaaatcccgaaaggcaaaaaagtttctctctttgattttctccataatggatttatcttccaattcataacgaaaagttggcatatagatcccgatctgtgcctgatcgtcctcagttttaaataagtcagccaacaattgtttcttcgaaattaccggcttagccaataaatccaaacgcggaaagcccagcttgcggtatttttttgtctcaattgccatacaagcactcattagtgattcatatagatcagagctagaagcaacaatatccgcattcttgtgccacaatttttcgttacggcgattgtcgcgtcgcttagtattattagccataattcccatgcgcttgagtggaacgccatgccacaactggacattaatttgatgcttgcgcaccttaaatggttggtgcgttgtaattacatatcgcgctgctccgattttctgccaggttttccacttcaagtgtgacgatggccacggctcaactaatgtaacgttatattcaggatgattcaattgcagccacttgtaaaaagcatagccgttagatccagacctacctgaaccattcaggataaccacattattgttttccatcgtggtaaatctagccaaaaaactcatccaagccaaataaagacggaataaaaagcttttcattaaaatacttccttaaaatagtctaatacctaaagcatataaaaaaagcttgagcaaactcaagcttttttctttatttttgttaaactttattctttacccatttttctctggcagaatttaacaatttcaacaatcaaaaccatcaaaattccggcaattaaaatgactaaccactgtggtccatcaagttcagtcacatcaaagaacttagtcataaatggcaattctaccgctgccataattacagcagcaatgataattgcaccattgaaccacttgttagaaaaagtatgcggtctaaaaatcgactgatgtacatacttggaattaattgcatggaacagctgaatcaagcccaaagtcaagaaggccattgtcaatgcatccccatgttgcaacgatggatcacccacatgtggaccgacatgcaaaccaatttggtatgcacctaaaactaaaattccttccaaaattccttggtaaataattgaactggcaacaccaccgctaaagaagttagacttcttaccacgcggcttgcgcttcataattccagcttccactggttcaacacctaaagcaatagctggcaaagtatccgttaccaagttgatccacaagagctgcacaggagctaagatatctcgacctagcattgtcatcatgaaaactgttaatacttcacccacgttacaactcattaaatatagaatggccttttggatattactgaagaccttgcgtccttgctttactgcttcaacgatcgtggcaaagttatcatcagccaaaaccatatcgctggctcctttagaaacttcggtcccagtaattcccatgccaattccgatatcagcttgcttcaaacttggagcatcgtttaccccatcaccagtcattgcaacaatcttgtcattagcctgccaagccttgacaattctaaccttgtgctctggtgaaacacgagcataaacgctgtagtcaccaacatgctgtttgaaatattcatcatctagtttatcaagttcagccccagttaaaacgcggctatcctgacctttttcaataatacctaggcgttccgcaattgcttgagcagttgtttggtgatcaccagtaatcattactgttctaataccagcactctttgcttcagccacggccgctttagcttcaccacgttctggatcaatcattccgactaacccagcaaaaattaaatcttgttcaacattatcagttgttggatcggtgtacaattggtcgactttcttataagcaagccctaagacacgtaaagcttgttgcgccatctgcttgttttgcgctaaaatattttgcttctgcttatctgtgatcggctctacttgaccaccattttcaatcctagttactcgctgtaacaacatatctggtgcgcctttgaccgctacaaagtattgctcgccatctttattaacagtactcatcaatttccgttctgaatcaaaaggcacttcttgaattcgtttgtatttttcaagcaagtcagttacatcaatgttttgatcaaaagcaaattgaatcagggcggtctctgttgggtcacccaataagtctccgccattttcaatcttagtatcattagccaaagtcattgccaataaagctgggttattttcgctaatactttcactattatcatgtaactttttatcatagaagaccttttcaactgtcatccggttctgggtcaacgtaccagtcttatcagaacaaataatgtctgtagcacccaatgtctcaacagcaggcaatttacggacaatcgccttatgtttggccatcgtttgcgtacctagtgccaaaataatcgttacaattgctggcaagccttccggaattgcagctacagccaaggaaacggcaaccaagaacatgttaatcattaaagtagagttacgctctgctggatcagccttgagcactcctacgataaagacaatcacgcagattgccaaaatcatgatggttagggtctttcccagttgattcaagtttcgctttaatggtgtatcagtttcatcagcattgttcaacattgtagcgattttaccaacttcggtgtgcattcccgtactagttacgattccttcaccatgaccataggtcacattagtattggaataagccatatttacgcggtcagctaaagcaatgtcttcaccttctaaagtttctgcatgcttttcaactggaactgattcaccggttaacgctgattcctcaatcttcaagctgtgggcttgattcaagcgtaagtcagcaggaaccacatccccagcttctagtaaaactacatctccaggaactaaccctgtgcttggaatagtaacgattgtatcatcacggcgcacatgcgcatccggcgtagccatttccttcaaagcatcaatcgcagcttcggaacgtgcttcttgaaagacgcccaaaattgcgttcaaaatgaccacaatcataataattgcggcatcagtccactcatgagctaataccccagacaaaatcgcggcaatgatcaaaacaataatcataaagtctttgaattgatcaataaaacgcatgaacatgctttgctttttcttggaagctaaggcattgggaccatattgctctaatctagctttggcatcactagcacttaacccatccttaacggacgtgttaagatctttttcaatatcggggatcgactcgacataatatcttttcgccatttttcctctgctatataaaacatagaaacatgcagaagtttgatattttccacataccagaaaaaaatatattcttcctttcctaattttatttactgtcgtcatcattggtattccgatattccatctggggagtaatcgcattgaccaactcctgcagcttaagggcttagccagccccattatcttttattttgttaatgccaataaatttaatactgcattgtcatcacgatcattgctatagccacactcataacaaacatattcattgtgcttggtgccatgttttctattgccctgcaaagtgattttgtctgcaccatttttgacatagccgcaactagcacatctttgcgttgacgggtagcttctatcagccaaaattagctctttatcataccaagcacatttataggataatatctgtctaaatttgccaaacaaggacctctgtatgcctttggaagccacatgcgtcatcatcatttgcttgacattcaagtcttcaatgacgatttggtcataattatttgccagctcagtagtaaatttttgcaaaagatcattctgaatattgaaagccctgcgataatcacgctgaagcttggttctcacttgcacgtaattattgcttcggccagccaattttccattaactcttcttttcttggccaatattctctgataatgcttgatccgcttgtacagtttctgcagtcttgccggcaaaatattgattctgccctcagtatagctgaagtgcccaacgttgacatcgatggcggtctttttgccagttttaacctttattccagctttttcttcgtaggaaagagcagcgtaataatggcctctttctctaaagatgctggcaattttaacctgtttcatcctcaatgcttcatatgttggaatatcaaaccatgatttaattcctctgggcttatccagtctgagcttgccattaataactttagctcggtcagtcttaaaaccttgacgtggagctttctttgacttgaaatgcggcttgccccagtcgagctgggctttgtcaaaaaagctcttccaagcgttggccaagtccttgactgccaactgcagacaacgagcagacaaggtaaactgccaatcagccttgttattgactaattcatctcgcacccgacactcattaggactaggattattatccttatttaaagtccgtgcttcatacatatcttgccaggtttctaaggctagattccagcagtatctgcggtaatcgcatagacggtcaagttctctttgcatggtcttgtttggttttagctcagctacctgtgttttaatcatttatttcacctccaatgcaaacataagtttagcaaaggatgaaacaaaaacaagcgaacaaaatattaaatttttagcagcagctaatttgtttctatgttttatcttcctgatcaaattaactgcatctttttctatttattgctatcaaatcctatcttttagtcaatcattatttcctcctcaaaaataaaaaagagacttacatgcttgtagcacataagtctcacgaattaagataaatccagaagtatcttacttcggctgttggattcatcgcaagcaattgctgttactcccttatgacaagttaattataagcaaaattttagctatctacaagttttagcgaattgcttttactttttataaaagtcatcaaagacagtaaccggcaaatgacgcttgtgtttactcttattccataatttttcaatttgatcagctgctttatctgatacttccttaccttcaaggtaatcatcaatctcttggtaagttacaccgagggcaacttcatctggcaaatctggcttttcttcttcaaggtcagcggttggagccttttcatataaatgtttaggacaacctaattccttaagcaaagccttgccttgacgcttgtccaaacggaacaatggcgtcaaatcagctgcgccgtcaccgaacttagtgtaaaaaccactgaagttttctgccgcatggtcagttcccacaactgcacccttgttagcaccggcaatagcatattgcacaaccattctttgacgagccttaatattccccttattaaaatcagtaatcttttggccagtggcttcaacgaccttcaccatggcatcaactggttccttaatatttacgatcaaatcttgatctggtttttgaaaggcaaccgcatcggcagcgtcttgagcatcagcttgaacaccataaggcaaacgaacagcgataaattgataagaatcatcgccagtttcctcacgcatttcttcaattgccatttgacacaatttaccagtcaaagtggaatcttgaccaccagaaatacctaagacgtatgacttaagaaatggattagcttttaaataatctttcaaaaaatcaattgaacgtctaatttcttttttagggtcaatttctggtaaaacatgttcataagcgataatttctttttgtaattctctcatcgaccaatgcttctttctctaattttacgccgaatatcttgaatcaaatccatcttggattcgtataagttttgtgataaatccactggatattcctgcggattcaggctacgcttatattcatcccataaaccatcaaggttgtcagcacagaattttttaatttcatcaagactaggttgatcataaactaattttccatctttaaaaatatcatgtaaaagtggaatagcagtgtaatcagttaccaccttattaatatagttatattgtgggtggaacatgaagagcgcgtcaaatttgcgtggatcttcattataccgagatatccagtcaccttcatttttcttagcagtgtttgcgctaatccgccatacttgttttttacctggggtggaaactttgatggcatttgaagaaatcttcaatgtatcccgcatggcgcctaattcatcttccatggcaaccaacttgtaaacagcaccaagtgctggttgatcataagcagtgatatacttggtcccaatgccccagacatcaattttagcgccttgcatctttaagttagtaatggtgttttcatcaaggtcatttgaagcaaaaatcttggcatctggatagccagcatcgtctaactccttacgaacttgcttagaaatgtaagccatgtccccagagtcaattcgtacgcccaagaagttaatcttgtcgcccatttcattagccaccttgatagcattaggcacaccactacggacagtatcgtaagtgtcaaccaagaaaacacaattcttatgtgtttccgcatatgccttaaatgcgtcatattcactgccaaatgcttcaactaaagcatgagcatgagtccctgaaataggaataccaaacaatttaccagcacgaacattactagttgaatcaaagccgccaacataagcagctcgagcaccccaaatggccgcatcggtttcttgcgcacgacgagagccaaactccattagaccatcatctttaacagctaacttgattctagcagctttagttgccaataaagtttggaagttaataatatttaaaatagcagtttcaactaactgacactgggcaagtggaccttcaacttgtaaaattggttcgttagcaaaaaccagctcgccttccttcattgaacgaatagtgagctttaattttagattgcgtaaataatcaataaagtcatcatcgtaaccttcattttctttcaaatattgcaggtcactttcggtaaactttaaattctttaaatagttaatgatgtgttccaaaccagcataaacagcataaccgttgccgaatggttccttgcggtaaaaactttcaaaaacggtattgcgatcagcaatccctttcttgaaataggtatacatcatattaatttcgtataaatcagtgtgtaaagccaacgaatcgtctttggctaattctggataaaacattgcttctctttctgtcattaaaaattaacaatttcgtttttcattatacagccattacagtccattggctattctcaaaactatttttacctcaaagttagatacactttttcaattgagtccaattgatttttaatagaaaaatgctcttccgcataccgcttttctgtattagccatctggcgtaactcttcatgggttttattaacggccagattaatctctttagcaattgaatcaatgtctcccgttttagcaatgaaaccatattcgggtcctggaatcattttatgaatatcacctacatctgtggacaaaatagggattaaattgtctgttgcctctaaaagcacaagtggaaaactctctgaatatgaagttaggacggctagatcaattcgcttatataatccgctcaattggtgttgagtcataaaaccgtgaaaagttacttgtggtgccatgtccaattgccgcgtcaaggccttcaatgcttcaagctgactaccaccacccgcgatatgcagacgaatatgctgatcatctaattttttcacagcttttaaaagcaattcttgtcctttaaccttttccgtacgagcaacgttaataatattaaaataggtatgttcatatttagctggaatttcactatcactgtggaaaaagatgccattatagatgacatgtaccttgtttttatccacatgtgcgcgattaattagtagcttggcaaaacgctgagttactacgaaaatacaatcagcttttctcaacgcacgtaaattaagtttagtaaaaatattgccaatgattcccctaccttcaaagtctagataaggatctgaatgtacagtaatacaccaagttgcacgaattcgcttgtgaatcaaagataaaaataagttggcacgcgcaccatgagtatgcacaatatcatagtgcccctcattgataaacttagtcagtctacctaaactgcctaagtcataacgactattagctcctagcacatgtgtagtaatcccagccgctcttgctgcttgtgctactggtccttctgccagcgttaataattcaaaatctttgccttcattttgggcttcagttaacaaattaacaatatgtgataaaccgccgccattttctaaaccagcatttacatgcaaaaccttcatcttagtaaaattattttcccttcttttttgactgtttaactcgcacaacaaactgtggcaaaactaacatccgcttaaatctgctaggattagtaatcaagcgataaaaccactctaaatgcgtcttttgaaaagcttctggtgctcttttaacgatacctgaaaagacatcaaaactgccacccacacccatcatcaaagctggtgtttcgttcttacgtaagattgataatagtttttcttgcttaggaaaacctaatgctgcaaaaaccatatcgggttgtgccttctgaatgcgccgtgccactagttccaaatcttcagtaaagtagccgtcttctgcaccaactagattaatatttgagtattccttagcaattttgctttgtactgcatgaattacttgtggcttagctccaattaagtaaactcggctaccacgatcgctagcaacatccatcagccaagtaaacaaatcatatccagtcacccgctcaggtaacggctgcttaagcattttagctgcttttacaatgccaatcccgtcagcagtaatataatcgggatcattttttagaattttcataaattcaggattctcgtttgccgccatcacaatctccggattagcggtcacaacaaaggtcgacaggtgattatttagtcgattaataaattcattttggaattggttaaaagttttattatcaaaatcaacacctaaaatattaactttgctcattttcacacctcatgcgttttcttatctagtttctattctaccattccgacacgcaagtacgagaaacatgttcaagttttatattttattcaaacatgataagattgttttaataaaggagaaaaaatgaaaagagttattacctatggcacctttgacctacttcactacggtcacgtgcgactgcttaaaagagctaaagaattgggcgactatttaatagtaggtttatctaccgatgaatttaacgaattcaaaaaacacaaggaagcctacaatacctatcctgaacgtaaatacattttggaagctatccgttatgtcgaccaagtcatccccgaaaaggattgggatcaaaaaatcgccgatgtacaaaaataccatatcgacacttttgtcatgggcgatgattggaaaggaaaattcgacttccttaagccttattgtgatgtggtttacctgccaagaacgccaggaatttccactactaaaattaaagaagatcttaaataaaaaaatactccaattccattcaatttgaatgagattggagtttttgtttacttagaaaaagtgaattcaaatcgttctgcaacgtaacgtgcgcgggtgtattcgaatggttgcccatctgctagttcagttacctgccgtctagtaattaacggttcaccttttttagctttaagaagacgcgcatcttgctcgttggcaattgatgcagaaatatgttccgtcactcgtcccatggcaaaaccaccgcgcttttctaaggttttatataagtgcgttgaaacatcttctttagaaaaattctttactaagtagtatggcaccgttacgacttcataacaaattggtgtcttatcagcgtagcgaatccgctccatccgcaaaacgttctcattatcttttagcgcaagacgctctttttcagataaagatggattgccaatctgataagaaatcagcttgctcgaaggaatttgtccattagctttagtaatctcggtgaaggacataattcctgacattttctcttgaaccttttgactagcaacataggtcccgctgcctaagcgccgttctaaaattccttcatcttctaatgttttaatcgcttggcgtaaagtcattctcgaaacgccaaacttaactgccaattgacgttctgctggaatacgatcccctacttgataaacgtgattctcaatatcacgcttaatctgattgtgaatcttgatatacatcggttcttccatagtcgccacccccaaagtttagtactgctattattataatctaaattggtctagcttgcattaataacactgcttcaattttacagactattttttcttagcggtccacttcactccaagaatataaacatttggacgcttgttatattccacttcaacttgttcattatcattagcaactacactggcactaaattttgcttcatctttaacagctaagttagcctgattaggattcagcacaatattgtggcccttcatattagcttcaccgctcaaagctaaaaagtactcatagttcatattcccagtgaaggtaacacgtgtagcatcacatttcgcctgatcttgaaaatctgcatgagctaaaattacggcattgttcattgtaacttttgcttcatcaactactatcattcgattgatggttgaattttgaatgattgtccgtgtctttttatcaatataaaccccacccaaaaaagtagaattcataatattgctccagcagtcatcacttaaataaaggcaggaatcgctagcagacttaacttttgaattaagcatattcatccaagtttgcccatgcagtaatacataatctacttccgaattattaagatccaactccgcattcgttttggcaaaagtattaatactgccgtgaatctttgaattatttacaattgctgttccttcgccttcaattgccaaagcacaatatttgtccgagaaataatcaatttctgaatcattcatttccaaacggaaattggcatggtcatacatggaaactgaaccgttaacaattttggttgaataaagttccaacgtgatcttaccattaaccgcgatagctgctgtatcagttcccgtgcccttaataaagcaattacgcaaagttaaatagccatcaacgcctactggtacagctaggctattatgttcggtagttgtatcaatgcataaattttctaaagttacataacgactatcttctgaaacactaatatagccataaatagtcgtgtcttctggcaaagagcctgttcccttaattgtgatatctgttagtgtgatgccctgcggcaaataataatatccggggcccagcatcaacacatcatcggcacgcaaatcctttaaaacctcgtgccaactgactgaactgctagatccccctactctaattatcctagccatccattatcctttcatctcgtaaaaaccgattactattgtactaattttctttaatttatgttgtatttttgctcatcaaaaaagctaggttcgattcctagcttcttatactatttcattttaacattccagtaataagccacattaccataaggagaaagttggaaacctttcactctcttattcaataagtatgacgtaccttgttggaatagtggtgccgcaaaggcatccttttgaattaattgtttttcagcgttaactaaggcattcaatctcttctgcggatcagtggcataagttgaacgagccaagtcaatttgcttccagaaattggcgttgtgataatctggcgctaaattaaacaaaccaccaactgtcaagaaatcaattggatcttcataacttggctgccaagttccgtaaacaaagtcgtaattgtgattagttgtgttagatagccgtgacttcaaaggaattgaccgtacccgtagagttagaccaggtaaatttttcatcaaattgctttgaataaattcacccacacgcttagcatcgtcaatatctgaagtaagcaattctaaggttagcttcttcttacccaattgcttcaaaccaagttgccattcctttttagcttccttggcattataggtaaccaagtcgccagcatccttgcggtaatcgttgccagttgcctgatcggtaataaagtttgcggcaacaattccatttgacaccttgccttgatgcaaaacggtcttgactaactgttgcttattaattgcccggctaatggcccgacgaatatgaacattgcctgtactcttacgcttcaagttgaaagaaagataaccattagttggcgtaactttggtatgatagctagaattattttgatactgcttaacaaaatcagaagtcaatgtcgtgtaatcaagttcaccacttctgaacaagttaaccccagttgaaggagtttgaaccacttgtacgttaactttattcaaatcaacaattttcttgttccagtaagttggatttttcttgtaagtccacttcaaatttgaacctgtccaaccagatacggtaaatggaccattgtaaactagattcttactgctagtcccatacttagagcctaactttttaaccaatttagaattctgaggatagaattgtgcaccctctaagatttgtggcaaatatggaattggattagctaatgtaacttgcaccttatacttgccgagtgctttgattcccaatgaatttaccggtgctttaccttgagaaattgcctcaccgtttttgataatggcataagaatcggcatctaaagatgaattttttgggtcaacggttctgcgccaagccgttacataatccagggcagtaactggatcaccgttagaccacttagcattattgcgtaaggtaaaagtatagaccttctggtctttagaacgttcaacttttgtcgcaccagctaattctggctgatttttcttattaaaacggtaaagaccttccatggaattctgcaaaacttctgaactagtcgtatctccatacttgctcgaatctaaagttgaaatttcatttgtgacagaggtattcattgtcttagtcggtgcagcattactgccattgttagagcaagctgccagcaccaatgcggcagctgctgtcatcactcctgaaaaaatccattttttacgtctcaatcttctcaccctttacttactttttgtttaatacttacattttacaagtatatctaatacggaagaaatttcaaatactttttccgtataatagctataatcaatacgtatacaaaaatggcaaaaaaaagaaacgtcacataggacgtttcttttttcgggttgggtgttcttttagaactattgggttagctggattcgaaccagcgcatgatggtaccaaaaaccattgccttaccacttggctataacccaataccagctgaactttttacttgtcgttcaacaatggaggagggtggattcgaaccgccgaactcagagagagcggttttacagaccgccgcgtttagccacttcgctactcctccgttagctgacttaattataataacgaaaatccaaatcaaatgcaagacttttttgaaacttttttcaaaaaaaagaagaagccatgacgacctcttctcaaaatttaaaaattgatttatatctaaacagttaattttaagcctaatgccttttgtgctacttgatttaccagactccattgcttgtcataagttggtgaaaagaagaaatctgcttctgctaaatcttccagtgtcaacttatttctaatagctaagctcaaaacattggcttggccattaatgtcatatgatgaaagtacgctaccgcctaagatttggtggctgtcttcattataaacaacagcaatatagcaagtaggattatctttttcaggaatatagtctggacgaagataactctttaagactgtttcttttgcattaattcctgctcgcttggcattcttttcactgagtcctgttgttactgcatgtaaatcaaaggcttcaagcaattgtgcaccaactaagcccttaaagacacgttccggcttgtcttcaaataagtgctcaacaacatattgagcctcatgccgtgcagcaatggcagatggcatcggtactcttctgttagctggaatgctaaacgggaagattgcatccccaattgcatagacatcctttacattggttctaaagtaattgtctactttaatgtagccattgtcataaagatcgatcgtgtttttcaaccaagcagtattcggcttaataccaactgtaataatgacacaatcagcagtaatatcacccttatcagtctgaactgcattgacctttccactgccaacaaagccagtaactttagtgttcatagccaggttaacaccatgatcagtcaattctttttcaaataagctagtataagtatcattcaaataattttctagtggtttttgcccaccgtcaattaaagtaacattcttgcctgctttagcgaaaacctcggcagctgcaattccgttaccagcaccaataactgcaacatttttaatagcttcatcttgagcagctgcattgatctctgtagcgcaatcatagcctctcatcaacataatatttttcaggtctgctccaggaagaggcaaacttgcggggttaacacctgaagaaataattagcttatcataactaacttctttggttgtaccatcttttacgtttttgacagtaaccgtctttttagctggatcaagagctgttactgctgtgttattaacaactttaccaccccgttcagctagatcttcaggagtaaagtttctaacgttgtctcggcctgtagtttttccttcaaggaatagcttcattccgcaagacataaaggaaacgaagtcgcctgcttcataaatcgtaacgtctacatcatcataacgatctaaaatttcataagctgcctcttggccgccgtgggatgcacctacaataatgattttcttttttgacatagcctgacctcctaataatgcagcaataattgtcgtttttaagtaatagcagttattgtaactggttacattatttatcttttaataagatatttcaattaatttgcttttgattagtgcgaagcagcaatatattttttatataaaaaagagcactactgatagtagtactctagagggaaattttccaaaattatcttatttagctaattctgctgatagatttcgttcactaatttagtgatttcattacgattaagaacttcatcatacatatccattgtttcctggattgtattttctaaattagtaccatgatttttggcatagccaatgaacttttttgcatctactattttagcttctttaatcgctttttctgcagctcttttagcaacttcattcatctcatattctagcttattcatgtcttcgacccattttccgctattcacgtagtagtcgatatccttctgcaggctgatatccctgcgtagtacatcatccgtttttctagatcatttttacgtgttgtttgcatctcaatatcatacactcgactttgatcatcttgtgcccagatatctaagcgaatgtttttggattctagtccaatgttgccgtcatactgggtaatgacattaacttttgtcaattttaattcaggaaacatccgacgtagcagttccagacaattctttttattgctcataacatgaccgaataccaagtcgttagtaattcgaggatatcgattaattcttctcctcatattttacctcttttctttttcttaagtaggaaaattaccctccactatttattacgcaaaaaagtgcaaattttttcagaaatttaaaaatttagacacgaaaaaagccgatgcaaatgcatcgactctttcagttaaattattctactttttaatagaagtttacagccttgatgtaacgcttattgttgtttctgcagccttcaattctgtagtacttcttgccgttcttaaatctcatttgaccaccgtaagtagttacagtttggcctctgtacatcttaccagtacctggagtacgacggtatgatgaccagtaaacgtaagcattgtgctttaaagtacgttggttaccggtaatgttagttacacgaacgtattcgtccttgttagctaccttgtagtaagtcttaccgttgatagttacgatagttggaacgatttcaatgtcattgtaagcatagtacatgtgacctaagtagttaccgttcgtgtcgtaagctcttgaatcaaccattactggcaaagtcttggtgttagtgtcaccagctggcttaacaagtgatgaagtcttaacccaaatgttgcttgagttagcatctgacttagacttagttgaaacttgtgagtatgatacattgttaagggttctagtttgatcagcaacgtaaacagtgtcaccatctttgaaagtagttgaagctggtcttacattaatgccataaatgtggtaagttgcgattgagcttgcgccattagcatatagagcttgtttgtggcttgaagtaattaaaacagtatatgttgcagtagtcttcttaccagttaaaccagttgcagttaaagttacattatagtaacgtcctgcttctgaagtattaacaggatttgaagttgcttctagtgaagcagctgtattattattgctgttttgtacagctgaaataataactggctcaccattactatttacaaaattagttggattaaattgtgaaccaacagctacttggaatatttgaccattaacactccccttgctttgaccattcaatgaccaattgatcactggattttgagtagtatctgtagttgaacttgaacttgaaactacaactgggatttgaacagtagctgtttgcgtagaagtagaacctgtaccagttaaagtaagattgaaatcactagttggtaccgcagtaatattcttgttatctttatcaagagttacacctgcattcttaagaatagcagcaacttcactatctttaaggttaactttttctccactggcattattcgtactaaagaaaactaatcctaaatcattaattgccttagtaacactagctacagtatctttagccttaatagaaatagtagttggtacaacattagctgttttatcggtagtacttgcagcatcaattacttgattgccatatgtaaagtatgatctatctgttggctttgctgttgttgctgtagtagtacttgtagtaccagtagtgttagttactgtacctaaactaatagcagcgttaactggaacagctgaagctgctacaggagcaactgccaacaaagcggcagcagccatacttacaattcttgtattctttctcataattatgtggcctttcctttctgaaacagaaattcatcctaagcagtaagttatatcttcttctgcttgtgaaataattatagcatgttacgaacccgattactaaaaacaggatcgactcgtgtgtgtgattttaagaatacttcctaaaatcaccagtaataccctaccctttatttgttaaactgtagttatcggacttttacaattaagattcaaaacattacatttttgtgaagttttaaacaagttattgatttatgacagaacttatgtgtgttaagaaaaggtaattttaacacttgttcgcttaaaaaattaaagctcttagattttttgattagaaataattgcttcatgttctttaatatgctcaactcgccctgcatcccccgcaataagtaacaaatataatgcctcaatcattgtcatacttgccacgcgtgagaaataatactgcgattgcatcaccgtctgccgcactgctgtctttaaatgcacatcagctaatagcgcaatcggtgaatcatcgcgattggtgatcgcaatcaccggcatccctttttgtttggctaccttaatttgcttaatgattcccgctgcttcccctgaattcgaaatcaccaacaagcaatcctttttactcaggttcattgtctgcgcaattgccgtttcaatcgtgccacctgaatcaattgccaacaagccaatctgattaaacttatacactgcatcagcggccaccggataagtatcgccctccgcactaacctgcacaattctgctttcagtcaaaaaatgcagcacctgatctaatttggcttcagtcacattctccaaagtcgccttaatctcggcgactttatttttttcaatcaattccaaattagcactagcatcatcacgtgacatattttgaagtgacacactttcagttgcattctgagctagttgaatttttaaatcatgaaaacctgtcaaatctaaattatgacaaaaacgcgtcaccgaagcatcactcaccccagcttcagctgctaattttgaaatcgtataatttaccacctgttcgggccgttttaagaccacttgagcaatcttctgatcgctggctgacatcgtagataatttgctatagattgtatcgataattttagtcattattttcaccttttctgtgccaaaattatatcatctatgtaattaattttcacagctttatttttaaagaaaataaatttatattttgattgacgaaaatcatttaccaaggtagtatatatttgtaaataattttcataggagaaaataaaatgaaaattaattcgataagtgacctcgctttaagtaaaatcaagccgaaaatgactatttctcttggcggcggaaataatgtatttaagttagctcaagcgattgcacagcataacttagacatcacattatattctccatccgaacttactcgctttaggtgcaaagaactcggattagagcttcttccatctactgcagcgactaagatcgatattgcttttgatggttgtgacagcattgataagaattttaacgttctaaaaagtttgggtggaattcatctttttaaaaaacaggcagcacaaattgccaaacagtttatcctactcttacccagtcaaaggatacaaccgattctgaatcctaaaattccactttgtcttgaagtggcaccgccttgtgttaatcaagtacagaagtatttaagcagtttacatttaactagtaagattcgacaagatagttcagtagctgcatttgcccgtacgcctttgggcaactacttaatcgatgtttttaacgaagattggcacaatatcactgaacttaatcgtcaactttgtttacaaaatggcgtagttagttcttcactatttgaaaacttaactacttcattaattactgaaaaagacggagaaattattgaacttaagagaggtaataatcatgaaaacatttaattggggaattattggtactggctggattgcacatgatatggctgatgctttgaacaaagtcaacggcgaaatttatgctgccgccaatccaaatgaagaagcactacatgcctttgtccaagaaaaacacgtgcaacatgcattcactaatcctgatgaaatgatcaatgatcctaacgttgatatcatctacattgctaccccacacaccttccactacgactacatcaaaaaggccctcaatgcaggcaagcacgtcttttgcgaaaaggcaattaccgtcaatgcgcgacaatttgatgaagtggctcaattagctaaaaagaaacacctaatcttaatggaaggttttaccctttatcacatgccaatctaccaaaagatgcaagacatgattaaggctggaaaatttggcgaaattaaaatgatccaaattaattttggctcactcaaggactatgatccgcagaatcgcttctttaataaggagctcgctggtggtgcattgctggatatcggcggctacgcaactgcttttgccattagtttcatggatgaatatcctgaaagtatcaataccacggtaaaattctttgaaactggtgttgacgaagaaagcggcattattttaaaaaattcgaaaggccaaatggcagtgatgtcattatcgatgcgggccaagcagcctaagcgcggactggtttcgggcaccaaaggttatttcgaaatcaatcaatatcctcgcggcactgaagctgatattacttacacccagagtgctcatgaggaaagctatgataaggttactgccggggatgctgatcaggcgcttgaatatgaagtcactgattttcaaaagtatattgaacaaggccatgacgaaggcgaattggaaaaatcgcggatgatcgctcacattttaaccagcattagaactgcctggggcatgacttatccatttgataacgaggaataattagttggatttcaaaagggatcgatacataacatcggtcccttttatttgcacttattgcttattttctgcgacatatttttctagtcgtttcaagccttctttaatctgatccatcgacgttgcgtaagacaaacgaatatatcctgctccacctttagcaaaaaatgagcccgcaattacagcaacatgcctcttttcagccaaatcataaataaacttggtatcatcttgttccaagcctgctggaattttggcaaaaatgtagaaggcacctttaggcttaacgcattcaaagcctaacttggttaatccttcataaagcacatcacgccgcttttggaattctttcttcattggttccgcatcgttcattccattgcctagtgcttcttcagctgcatcctgcattggcgttggttccgtcgttgtgattgcttggtgaatcttagccagttgatccaaaatcggcttaggcgcagctaccacaccgattctatagccagtcattgcccaagcttttgacacgccattcattaaaacaactagatcatgtaaagtcttttccatcgaagcatgtggctgatcataattgagctcactataaatttcatcacaaagaacaaaaaccggcttatctcgaacaacatctgctaaggcatcaagttcatcttgtgaatacatcacacctgttggattggtaggataattcatgacaagcgcctcaacgcgatcaccatacttgtccaatgctgcttgcaatttatccggcgttaatttgaagtcatcgtcagaagtgtcgatttgttcaaccgttgcacccatggatagggcatccccaatataaagcggaaaaattggtgttggcaccaaaacaacgtcgcctggattaagcaccgcagtcaaaaagtcgtagatcgactccgttaccccattggtgatcaaaatttcgcttgggtcgtatttttgtccatatttttcagctaaaaaatcggctgccgccttgcgcaaacctggagtcccgttagatggcgcatagtgtgaatggttattagcaatgctggcttcagccgcttttttaatatgctctggcgtgttaaagtcaggctcaccaatcgtgaatttgacgatgtccgaaatcttgttggtgtaagctgcaaaggccaaaatctgccctggcttttgttcaaccaagccttttttcatatgttttgttaagtcgaccatagtttttcctccttatatcgaactaaatcaattcaaatataggagtctttttaatctttgtcaaaggaaatattaattttgatatctaaagtgcacattaaatccaataattaacaaagcataaatactataaatagccgtaacagtcggatacattgcctgatactttatcagcaaaagaataattaaaactatcgccaaaacaatcgttaatattctaaaacgttgaaaatatgacaaaatcggtaaagccactgtcaaaactatatcagttattaagatagtaaaatccaccggatatgatttgatataaaaaaactgaaatattggcaatgcttctaacagtaagaagatataactaataatcccacatattaaaagcaactgattaagtatctttttatagtctttcattaaatcaagaacttctcttttttcatgtaccagtgcttaaccagagtggtcaatgcaatgtacaaggtcaaaagtacaagaactacgagaacataatattctgggatcggaccgaatttcattaccttagccaagcttggaatgtaaggcattgcagtaccgatcaatcctgcaccgatcgtagcgagcattactacgcctgaagagtgctgttgtaagaagggaattgctggatcacgcaatgcttggataaccatttcctgtgtccagagtgattcgatgaaccagccactccagaagatggccataaagacagccttttgccctggagtagcagccacataacttgtgcccacagtacttggacaaatccagaagtaaagcaaggcaaacgtaatgatatcaaagattgaagatgtcggaccaaagaagaacatgaacttaggcaacttctttgtctcccacttacgtggtacttccaagtatttttcaccaactctatcaaatggaagtgacaaacaagatgtcccgtagatcaagtctagaatcaacaattgcattggcagcattggcaagaatggcaagaatgatgatgccactaagattgacaaaatattaccaaagttagatgacaaggtaatcttgatatatttcatcgtgtttgcaaagatctgacgcccaattcttacaccatgttccaaagtacgtaaactcttgtgcagcaagataatgtccgcactcttttttgcaatatcaacagccgtatcaactgagattgctacatcggccttcttcatggctggcgtatcgttgataccgtctcccatgtaagcaaccgtgtgaccattttccttcaaaatctgaataattctagcctttgactctggtgaaagctttacaaagaggctacattcttcaaccatctttttaacttcatcgtcgctcttaccagcaaaatctttttcactataaatgtacttggtgttcaagcctactcttgaagcaacactcttagttacagcagcgttatcaccagtcaaaatcttaacggtaatatcgtcttgctttaacttcttaagcacgtccttaacatcatccttaggtggatcaaggaaggccaagaagccagttaagatcaaatctttttcatcgctaacattgaattcaccggcttgagcaggattgttcttgtaagctaacaaaacaactctcaaaccatctttgttcaaatcttcaatgtgctttaaaactttttctttgtaatcatcagttaaatcgttgatgtgactgccaacttgcacacgattgcagcaagcaagcatttcttcggcagcacccttagttaccaggatacgaccatctccgtggcgcttgaccacgacactcatgcgacggcgcttgaagtcgaatggaatttcatcaaccttagtgtagtcgtgtttaatttcattaacatctagctcatcgctagcggcatcgatgatggcttggtccatcaaatcgtgcatccccgtttggaagtacgagttcaagtaagccaagcgcaaaacctgtggattttccttcatatccaagttgtagtgccgttccaatacaaccttgttttgggtcaaagtaccggttttatcagtacaaagcacgtcggcggcaccgaagttttggatggagttcatctttttaacgatggtgccgtgcttcgacatttctagcgaacccttaaccaaattactagtaacaataactggcaacatttctggagttaaaccaacggcagtagcgatggcaaacaacaaggcgttgagccagttacctttagttaaaccgttgatgaccaaaactaaaggtgcaatgatcgcggtcattgttaacaataatttagaaatgttcttgataccaacatcgaaattagtttccttaacgtcgttgtttgaaatatccttagccaaacgaccaaagacagtttgttcaccggtggctaaaacaacgccaacacctgaacctgacacaatagttgttccttgatagattacatcaggatagtccaaatattgatccatgtctttttgatcgggcctcttagtcgcaatcttttccacaggcgttgattcaccgttcaaagaacttgatgaacagaacaagtctttagttttgagcaatctaatatctgctggcaccatgtccccagcgtggatattaataatatcgccgacaactacttgcttggtagaaatttcttcatccttttgattgcgacgaatattggtagttacagacaccatatttaagagggcttcaactgcgtcattagttttcacattctggataaaggatgttaatccagaaataatgatcatcgcaatcataatgatcacagtactcaggtccttttgatctgccggcacgaagacgtagtcggtaaacagcgacaccgtcgctagcagcaacaggaccattgtaaaaggagtgaagaatgattcaatgaagaaatgcaatttcgtgttgtgcttcttggtagcaacttcgttaagaccattcttctccaaacgctctttagcttccgccgaagacagaccgtctagcgaactatgtagcgtctttaacgcttcttcgggagtttgcctagcgatctgcttaacaaactctgtatcggctgtcttcttattaatcagcaacttgttttttgccatgttaatcacactttctgattaaacacgcaaacaaactaaaaaggagccaataccaattagtattaactccttatctaagcgatgtttcctcgtcgttcagttttgacactacgtgacgtaagcacaggctagctatctggatctcgccttatctcgacaagaactattttactcgttggcatctctggatgtttccgggcgatagcttgtgttcacgtaggagcctcacctaacagtttatttgctttttcaattttcatttttattatatgcatattatttgacaatgcaattatctttactaaatcgttagaaattgtaaaagaatttaagaatgataaaaaacacgtgtttgcaatgaacacgtgtttttttataatttaattttgatatactattctatagacatggatatgttgcaactatttgtgtttagtagttttagcataactaaccacccctcacacattttgaaattacggcggtgagagttatgcataaacggatagtttggaggtttagtgctccgtggtagcttgggctattgcaatcagcatcgttctaggtgctttaggcaatttagctatcaatttggctatagcctatgcgataacaaaaaaagctaatcgcaaggattagctaaaccaacagttatctgaaactacgatcgaagtcaacggattgcggccgtgggcttcttttcatatacagattataacatgaattatccgaaacgaataaaaaagatcaggctcactgcctgaccttgctattgggttagctggattcgaaccagcgcatgatggtaccaaaaaccattgccttaccacttggctataacccaatcttcaaaccttttacttgattggttctatttgaatgacctctcgatcacccaacagatattagtataggggaatgaagaaaaaatatcaaggaaaaattcaaaaaaattttgattttttcacatttgctcgaaggatactgaatctttcttttatgaattataaaattaatttgtttttttacgattataacttttgtgacttcttaaccttattcattaattcaaagtcgttggtaaaaattccagctacaccaagtttaaagtacctttttgctatgcttactttatctactgtccaaattctttgcgtaactttgctaggtaaataccaatgcggatggatcgctgcaaaatgattcttagccgcaaactgttcaggaaacggcaccggccatttgtttaaaaagcaatattgttggtggggatcaattcgctggcaattttttaaggtttgataattgaaggaagagaaaataatgggatgcacaaaatgatattcttgtgctaacgccaaaacgatggcttcaatcccctcatcatgaatcttgttagtcttaaattccaagttaacatacaaatcctgtccctgaagaatttcaaataattcacttaacatcggtaccggttcaccgttagctaaacgaaatcgcctgatttcacttaaggtatagtccttaatataacctgtcccattagtagttctatctaacgtttcatcatgcattactaccggcactttatctttagttaagtgcacatcaaattcgacaccttcagcgccatgcgttgctgcatatttaaatccttgcaaagaattttccgcaaatttgaccggtaagccccggtgagcaaaaataattgtctgagtcattttttcacctacaaaaaaatgccgctctcgcggcatctgctctattttaatctaagacgattgcaccttgagttgccaaagtatcacgaactagattcttaacatctcttctaactaccataccatcggtgttctcaacgtattcaagatattgagctgacttaatatgtgcatcataagccttgtcatcaaagtaaacttcgacaaaataccattcgttttcgttcttcttattgactccagacatcataatttccatgcctggttcagcagccatgctagtcgtcatttctttcttaacttcatgcgcaaacttttctgcatcttctggtttaacttcaactttaactaagcgcattacaaaatgatctgcgttatcattcaaagcatcatgagcctttgtggtaataacttcgggctttaattcgattacttctttgtctgtggaaatcttgtcgatggtttctgcaaaatcatcagcatgtgctgctgcaatgtgcaaatcttctgccaagctattccggaacaattcgatttcgtaattgtcttcaccatgagcatcgtcatgtgcgcttccaattaacaaagttccttcttcagctggaattgagttgtgcatgttattttcaacttcacggatatattcaccgcgatcgttttccttgatatttaatttagtaattctaaaaattggtgtttcatccatttttcttgcctcgtactataatctttccacacctatcattataaactaatgcagaaaaataaaagcccctattcaccagttatttgatcaattttaaccgctttagctggccattcagtccgtacatattccaatgtactgccttcattgcaagttaactgcacaaaagaacaattgggcagacctaaaaattcacgatggttagttttttcattaatgtattgcgacaaactatcgccatgaccaacaactaaaatattatcgccatcttgtgcatcccgcatgatcaagttaatcccgcgctccattcgctcaactacctcatgattatcttccacgcgaaatttgcccaaacgatgcagcggccaaagtagcacattgcgtgcctcaaaagcgccatagcttttctcttttaattcctttaatcgaacatactccatctcaggcccagcaataatctctaaagtatcacttgccctttcttggggtgagcaatatgctctagcaaaattaattccctgatcttgaaaataatcccgcacggcttccgcctgcttaatgcctaatggtgttagcgctgaatcacagcttccctgcatgcggtgtcctttattaaaccaagtttgaccatgtctgactaaatataaattaattgccatttcgtcttactttaaaccctctgctggccacacgtatgaatcaaaatggatctttttaccatcaactgttagcttcacgattgaagcattgccaaaaccgccaaagttcttattctcggtagcatcgcgcacaaacttagctaaaatatcaccatgtcctacaactaaagcagtttgaccatcctctaagccgcttaaaatctcgactaccgcacggtgcattctagcaacaacgtcttcgtctttttccatagttgggtctacgttaggattattataattccaaggcaataagaactcatcacgaccttcaaaaatgccataacatttttctcgcaggtcttttaaacgcgtataaggcatttgatgatcagtaataatttccaaagtatcgcaagcacgctcttgggttgatgaaaaagctttgtcaaaatgaataccctgctttttaaaataatcacgggccatttcaacctggcggatgcctctttcattcaatggtgaatcacaacgtccctgaactttatggtaatagttaaaataagtttgtccatggcggactaaatataaagtttttgtcatattttcctcgctaaatcgttttttcctttatcttatcaaaaaagcacgcgtcgtgcgtgctttcatattttttcgttaaattttgaagttcttgttgtattcactcgaatttacaacaaaacttggcacactaatgaagtgcattgagtaaatattgccagtcttggaaatgctaaagccataataattgtagtccccatcatgacgtgagccctgtgtattaaataaatcaccggcatgttcccattcgcggtaaaggctcttatcattacgctgattttccccagctcctgcaaagccaaagatcatttgcttcaagccaaagtaaatatttcgcttcatttcagccatagacataatcttcttattagtagaaaaaccagccatatcttcgacataattatcgtttaattctaagccatgtttcttgcaagcccgtacaattccggcaacatagtgatcgccatctttgatactcttgccattttgctcgtattcttgcgcaattgaattagctaaggactctactccagaactataaacccacggcttcaaacctaattgactacgagcactattaattaggcacaaagagaattctgccagttctttttgctcactagcagaaagatcggcaagattgatcattttttgatcggctttgctttcacctgagctaacacgtgaaaagtcgttttgctccattcctttcatgcaagcctgaataaaactagcacttggcttccccttatatgcttgcaataaactagctttcgtatagccactcggcatcttcattgtagctgttacataattctgcgttgcagcagtctttttaacgagtttggcatttttagctaataaccattgagagttatttccaatcttataagccaaatattttttcttgcccagctttaaatactttttagcagaataagaatactctcttttagctacagcataatacttagacttcttgcccttatttgtataaagtctaactttctcagttcctttaacctgaacttttcccttaactgctgcttgaaccgtttgtggtgtcgtttcgtgtattacactagccgtccccatcaggcaaacactagtcaacaaagtcacaattaatttttgcttcatagctgttccactttctgtatgttttgattattaacttaaacttcccacacgcaaaattgcttgtttcattgtgattctgcgtgttttgacaaatataaaaggcacaagtccttttcattgctataattatattgaccaaaacataatttatttgcatgaaaggcttgtgccaatgtctattttaccatctcctgaccaacaaaatgaacaactattttcaaactcaatcatcagcttcatcaagaagtttcaggtgatcaagctgttgagaaaatgtggcttccgcaaggaaaaaggcattagcctgttcagcttgtttctttacgttttaagcaatgtctttcgtgaccgcagcttatatatgcagctgaaaatggatcattttcaagaaaatttttccaagaactcatattaccgttttatgcgcaacgttcacgtcaattggctccacttcaccacacttctgtctgcgcaaatcattaataaccacttgcgatctttgacttcagaaaaacgggctgattgctttgttgtcgatgattcctacttctctaggaccggcttcaagaaaacagaattagtcgccaaagtttttgaccatgtatcaatgacttacaagaaaggttttcgcatgatgaccctgggctggactgatggagcttctttcatgccaatcaattcagtgctgctgtcttctcagaagctacagaatatgattggcgaaaataaagtttttgatcagcgcaccattgctggccaaagacgtatgcttgcccggactaaaggcacagacgtgatggttaatttaatcgaccaagctatgaaagcaggtcatcaagccaagtacgtactgtttgacagctggttctcaaatccacatcaaatcgtccagctcaagcaaaggaagctggatgtgattgccatggttaaggttagctccaaaatcaaatatgaatttgagggagaacgcaaaaacatcaaacagatttatcgcagctgtaaaaagcgatgcggccgttctcgctacctgctgtcaatcccagtcaaagtcggacgccaggacaaagacggtgctaaaatagatgcacggattgtctgcgttagaaatcgtgccaatcgcaaggattggctggcaatcatttgtaccgacatgtcgcttagcgaagatgaaattatccgcaactacggcaagcgttgggatattgaggtttttttcaaaacttgcaaaagttatctaaaactaagtacggaatatcatggcctgtcttacgatgctttgaccgctcatgttgccatagtttttactcgctacatgcttatgtcagttgccaagcgggacgatgaagatgaacgcacgctaggcgagctgttctattgcatgattgatgagctggcggacattacttttagccattccttgcaattgattactgatgcaatgctggccagcgtaaagcaagtctttcatgccagtgaagcacaaatagctgaattcacggctgactttatcaatcgtttacccaaatacatgcaaaaattgttaaagaaaactagcaaaaataatatagaagcctaaagccaagcaagatcaagagattactggcttatttagtgtgggaagtttaagttattaatatttgttatttaaattatatcgtatttatttaattaaaaaaatcaaaaagagacacactatcattttgacagcatgcctcctttaagttagtttgattttatttagttttgaaaagaggtttatttttagtaccagccgtttgcttgccagaatgccttagcagcagtccatgagccataacgacctttgacatagttatcagctactcgctcttggttagctgctgaatagtcaccattcaagtatgaagctgaaagttggtatttaccaacgtattgaccatttgaagcactgtatgagccaccagattctctaccggcaatccattccttagcactagcttctgaaccacttacagttgaagtagtagtttgagtgttggtgttatttgctgcagtagtagttgctgcagaattagtattttcagtttgagtttggtgttgtactggagcttgggttacagcagcttgagtgtggtagccgcgagttacatacttagcacgaacccattggttcttgcctaagtcataccacttgtgacctttggcatcgtaagcagtcttaattactttccatgaggtgttgcttgccaaagtttggccagtagcctctggattcttgtagctgttgtaaacagtgattgcgttgtctgaaacgttcttaactgttacaacagctgtatcgttttctacaatagcagcttgagcagtattagtgttgttattagctgctactaaacctgtaactgataaagcagttactgcaattgacttaactaagatagatttaattttcaaaaaaattctctccttaaaattttaaaagtcataagtaacgaattttcaccttattcgtccgtcccattcaattgacacagcatatactaccttgcttaaattgcagaactataacaggaatatcacctgcagattaagaaactattgcaaagtatgtcaaaattgtaacaattgtaatatttatgtaaatttattcagatgatacaaaaccgcatcagatcgccatttaactcgatttttaatttttatttgctatgtgcaaaagcttgttcgcatttaatatattgaaacacttttgcaaaacgaaaaaagaaagagtttcctctttcttttttaattctcacaaattttttattaatttattccattattctgccttatcctcttctataagttgacgtttattaagtgccgcaataaatggcaggtaaatcaaaatgtctaagataatattgattacttgcaaaattgagcccgcaatactgcctgttgccaaaaaaactgaaataattggcggcattgtccaaggaattacagtcccattacataatagaactaagcctaggttcattgcacaataagtggtaatcgcatttaacattggcgcaatcataaatggaataattaacaacaagttcattacaactggcagaccaaacatagttggttcattaatattgaacaagccaggtacgatggtcagtggtgctaaaactttattttgtttacttgcgcgcttgcgccatactaaatatccaatgcaaagcactaacccaatagtggcacctccatcacccatgtaaacaaagttatcgataaatggttgcgtaacgatatgaccaccatgagctaaatctaagttacctgcttgattcaatacacggttagcatcggtttgcatcaaccagattggttgcatagcagtattaactacgttaccaacatgaataccaacgaactagaacaagctcaataaaataattgaaactaatgtaccaattaaggtatcgcctaatgcacctagtggcttagccaaaatattcatgattacatcgtgaatattgccccatccaatccaagcaaaaagccagtaaacacagccagcaatagcaattacagcggcacctggaattaaagctgaaaagctcttagctacagcaggtggcacagtagctggcattttaatttggatattatgattaataaaccattggaaaatccatgcacttaggagaccaaagataatagctacaaataatcctctactacctaagtaagtgtaagggaagccttcaactggaactttatctccactcataatacttggcgtcaaaatgaagaatacagctgcagaaacaattccggcagaaacaccatctgtcttatattgattagcataactccaagcaattccaaaagctgcaattaagaccatgatcccaaaggagccattagtaatcttggctaaaatctgtgccaggcttataccatgaacagcagtttttgatagccaatcagaccaaccggcaactggaaatgaattaatgatcatgaataatgatcctacaataattaacggtatagccatggcgataccgtcacgaacagcaattaaaggtttaaaactgcctattttagcggctacaggcataatgtgtttgttaacaaacgcattcaaacctccgctcgatttactattagccataataattccctcttcaatctaaaaatgatctcgtgtttctttggtatatacctttcgcaatataacaatatcctgaaagcgattttattaccactattttaaaagataattttttgcttatatttttaaccaaagtttgattaacaaaatattgcagttatggctgtaagtgctatagtttacatgtaatcataaaaaaagcgaggaaataaaattatggctaaatacgaagtaaagttaagcgaagaagatttacaaatgatcaaagattgtcattcaaagaacccttcaatcatgaaggctatgaacgaagccaagaaagtcgaagattaagcaaattttgatctctaaatcgaaaaaaggcgtccgtaagggatgccttttttattggttttcaaatcttgtaccgtggggatgcttccagttataaacacggactattttacccatgccatctagcactacaacatttccatcattatgtggataaatcaatggatcagaatgtgaaccaccgtcagtaaaaattcttgctggctcacctgggtattgcactgttctaactatacaatcatcaattgatagccgcctcatttgtcgaccatcatcatattttccttctaaagcagctgttggcgtatgaccagtcacaattgttttgcccgttttgttatgagccatcattttcaataaggaatcggaataccaatacttatctcgtgcccaaatacggtaaaaatcatagtcaaatttcaagccatactctatctcagagtaagtttccggatcattatactgttcatctggccgcacacccgcatgaacaaaaatcaagtgtggcgtttcatacataataggacagccttttagaaagcgataatactcactatcacgcaactcatcaggcaaaactgtactgccaaacagactaactaggctcttgccaccaccgttataaacccaaatgccatcttgatgttcctgcttctccgcaaaattgagtaacatttgctcatgattacccagtagtacgattgctccttcgcttttttgctcaattaaataatccaatacttccttcacatgctcgcggccatcaacatagtcaccgcccgcaactaattgtgcttctggaaaatctgctgttgcctgcttgattaagtctaaggtttctaagttgccatgaatatcagaaatgaagatatagttctccttcactcgatcatccaacagcgttcgattgataatttttttcatttcatactaccccatgtgctaaattaaactaacatttttttcttaattatagcagatgtacactggttctttttctatgcaatcctaaaattaacctccggcaaaaaaaaggctacaatagatatgaaaagaagtgattgcaatgtttaatgaagaaaatgcaattgatgccaaggacttacacgttgattctttcaaatatcaatcaactgaagacatgccatctgatgcttattctagctgggaagaaaaacacccaaacgccagggtattcaagcttgaatttcgcaacatcggcgaaagcaatgaatggcaggaaatgatcattatctacactgaataaataaaaagtggaagaactccaagcctagtgtgtttcttccacctttttacttattttgattttctttttccttcaatttgtgcagaatccgttcattttctttagtacgtttttcaactgctgcatcgatgatcgaatcaaaccaatgattatcagaatcatcgcttgtttgatccttcttttgaggaccttcattttttacacgtttgtcagtttcttcattaataatggaatccagccaatcaaaattatctggatcatggctcttatcagtcatttatttttcctccatttttgatttaaattaatttatttactattctttttgactataattgagttaacaagatgaaacaagaaagaagtgttcgaaatgaaaattacattcactgacaaggcgcttgactacttaaaaagacgcgaaatcttgaataaaattctaattttaatcgccgacgatggtggtggtaaatattctatcaaaggcggcggttgtgcaattggcagtcacttttccattatttatgtagacaaagttgatcctgattatccaatcaagcttgaaaacgaccaaggaatcaatatttacacttctaaatacgacaccacaatgatgggaccaaatttagtggttgactacgccaatgcatccctcaacttaaagagtgacgaaggattgcttgatggcggcgttgatatcggcaatggcgccgagttaattaaagctcaaaagaatgtaaaaatgaccggcgttgaatggcgttgctagattaagatgatcagaaaagacagtagtttgaaatcaactactgtcttttttctatagaaattgaccactattaggatcgaatccagtacgatctgccgcggtaatctttctaattaccttgcatggattccccgctgcaattacattatctgggatgtcattcacaactacactgcctgcaccaataattgaattacgtccaataattgtatctggagttacgctaacccctgcacctagccagacattgtcaccaatgccgatcgaatgtgcaacacaaccaccggcttttcgctcggctggatcaaataaatggttgctggtatacaagccaaccttaggaccaaacaaaacattgtttccaatataaacaggcgcgccatctaaaatcgtgcaatcatagttggcataaaagttatccccaacatgaatattttgtccaaattcacaacgaaaattagggttcacgaagggatgctcacctgttgaaccaaagagttctttgattaatatttcttttttagcgtgatcattctcattattaatattattggtcttcaaggtagcaaggtctctcaaggtgccaaggcgaggatccgcatcattataaggacgaccagtagccatgtaattaaattttgttctaagcgacatgattctttcctttcattagttcttctatttttattatagaaaagaaaaagcgctttcgcatgtttgacgcataatatttagcacactagccctaatcttattgcttattctataatggtaaaaaagaaaggattaaagccatgaaaaacttcaacaaatttaccgctaaatctgcttgccttttacagaatctactagtagtctcaattggtttactcgggattattctgatcatactcttattccgcgatctaattccactttgccaatcattattttcaactaagatcgaagaaagcaactccgagattatgtcagaaattatcgttttcttactcttctttgaatttactgcaatgattatttcagccttgcgtcatcacggtcacactagcatcaattttctattgggcttaggtgttactgcgctaattcgcagtctgattacttctcatagtaacatttggagtacgcttgcaacttctgcttcaattttagtactagtaatcgcaatggttattttcaataaaaatctgcgtaatatgtaaaaaaactgtatcactctaggctaatgtcattggagtgatacagttttttgttttactaattaactttgcgccatgaactcattaagttgtttcttagaaaaaacattgccatatttgcatactacgtttcctttcattattgaacgtaattcacacaaccaaaaaagcatcatttattaacaatattgaaaataaataatgctttttagtaatactctgatgctgaatgccagagtcgaactggcgaccttctctttacgagggagatgctctaccaactgagctaattcagcaaactcacaacacatgaattataccaaatgtcgctaattggcgcaacgacctttttctaagcgtaagtgtcaatgtttttgcggtagcctttaaaccattagtctaaccttaatttcttaaatatttatatgacttaaatttctgcttagcttgcttaaataactattgccagctacctgtgcggttaatgcgccatgctggatgcctaaatgaacttcatgacgcttctttaagctgtcacgggccgctgcttttaattcctgttcagtcaatacagttatttctgaatcttcaaactcgctgctaagccaaaattccagctctcgattcttgatgcagcttaagatcctaagcatgccttctgctccagattttgaccatttcttgccttgccccttaacacggtaggtatacttgcggtggttgctctcgcagcagccaatggctttagtcacagtcagttttcgtttcttaaacggcttaatatcgtcccaatgacgatcaatataattccttaggcgccccagataatcatgattgagctcggtattcaattcatcaattagtcggctttctgcagtggttaggatagttttaactttgtcatagctgtatttgtattccaaagcagaaatcagcttgccttgcaggtcaggcgcaaaatatagcctttctttgattttcttatttaggtgaaagacatccaagaaatgctcatgacgcttgcatagccctacaatgtcatcgaagtctgttttggcatatccagcaccgccatcggcgttgctaagaattacagtatcagaaagatcataagtattggccaggtactccttggcttcgttcagcgcatcaagtcggcttaaagaaacaaattccttggcattgattcgctttctgcgtttcttgcttatattgacaatgccttcacagacctgatagcgatgaaattccaaccggcttttagtgcctttgatcaccacgccatcgccttcaagatacaaaactgggacctttttcttagtgcctgcggcatcatatcttgaatctgcttcttggcccgctttaatatttttcccggccatttttaccaaattgcccacctgcatatggctaatattaaagccagacaggcaattgactgctagagcagtattgcgataagtggcaacgctgcttacttctaagatgtttttgactgctaaaatactgtagcgcttgtatttgtcaaagcccattaattcatccaagggataccttgcttgtttgcctgggcagacatatcttcttctgacatacctaacttcgccaaaagccatattgattgagcgctcattcttcttatcaatctgatagccctgtgctttaaccttggtaatcatttcatcatcaactttagctaaagccaaggccatgatttccttaatcaggtttaagaagaaacagattatttttctttcacgcttaatataattatcttcagactttataatatttgcgatttcagttacaattgaattcataaaagaccagcttctaatgtgttttttgttcttaacatcagactactggtctttttgtttgagctcaagtccaaattcaaaggacttgggcttttttaattatttattcaacttaccgtaaaaaattatacacttagtttctaagctagcattcaaaaaagaacattatttccaatctaagcacaatccttgcttgtgcaattcttctggcaattgatcacgatcagtttcatgcagatcaagttttttacctgtaatctgcttagtgaatgaatcaatgcgacggttagaatcacgtaagtcataatatgtcgtaactatatcatcatagtctttaaggtctttcacatcaaagtctttcttataactaccttcaaaacaagtgaacttaagtggtaatcgtggttttaattgtggcttttgatctggcataccgacttgcatccccaacactggaaaagtcaactcaggcaaatcaagcgtcttaagcaaatccaacggatgatcgttaaccgtaccaagtggcacatagcctaagcccatactttctaccgcattagcgacattttgaaaagcaagcagcgtatcttctattgcttggaaaaagatatcagttgtgtgaacacggccgtcgtctttgtcaagttgctttctaatttgttggttacggtacaagtcaacgataaaaataaacaaatcgccttctgcaccaacatatttttggttacataacttttgaattttcttcttttcttcaggatcggtaacgtgcagtaagctagcattttgcataaacatgctggttggagtttgaccaaagacagaatacaaagtttccagttgttctttagtcaaagtttgatccttaaattttctaatagaacggtgatttaattgcgtgtcgattgtttcgttatgtatcattttcatccttcttactaataatcagtaagttcattataacaaataatatggctacttttcttcaaattcaattccgtaatctgcttgctctccgtgctcagctaaatcaagccccattaattcatcttcttttgatactctaattggaataatccttttaagtaataaaacgattatcgtcgtcatgatccctacaaatatgatagtaaataaagttcctaaaatctgagctgtaatcaaatgcaacccgccaccataaagcaagccattttcaatttgcgggttaacaatcttagtcgcaaataatcctgtcaaaatcgaacctacaattcctgaaacgccgtgacagccaaatacatcaagtggatcatctagcttcaattttggcttaatcacatgaatgaagccgtaactggctagtgtacaaataaaaccaatggcaaaggctcctgccacagtaacatagccagctgctggcgtaataccgactaatccacacaaggcacccgtacagaggccaatcatagtagtcttttctttaataaacatatccaaaaacatccaaaccacaaatgacgtaccagttgcaacagttgtagttaaaaacgcttgtgtagctacatcgcttacagttaaggcagaaccaacgttgaagccataccaaccgatccataatatactggttcccattaaaacccatggtaagttataatgcttaacctcaccatttggatcaaaatcaattcttggaccaacaaaaattgataaaaacaaggcggtaataccggcggtaatatgaactacagtcccacctgcaaaatcaagcatccccgttttggctagaattccatctggtgtccaaaccatatgaaccattgggtaataaatcaagatcgaccaaattgcgacaaatgcaagtaaaaatttaaatttcattcttccgaccaccgcaccaacaaacaacgccggcgtaataatcgagaacatcatctgaaacattaaataggtcaaaattgtgatgcctgaatccttggaataaagcgtctttaaatcaaagccgtttaaaaagacacttttactcaaaccaaatattccaccaacatccttacccaaagccaagttataaccaaaagcaataaacaaaacgattgcgacacctgtaatcatgaatactgaaatcatcgtattcacagcattcttctttgaaaccatgccaccatagaaaaaagcaagtccaggtgtcataaagaaaactaaaacactagcgacaaaaacaaatagagtgttcgtttgattaatcatctttttttctcctcaaagtaaaatagttagtcctaatattttaaattggtatatacactatttcattgatgttgcagcatatatgcttaattaaaaaaatattggtttgataaaatttaattctcattatacactcatttttcttcttgtcattaattttctataaaaaataaaggtgcatagacgtatggcttctatgcacctttgcatatatttgcttttaattatttgttttcgttttcaagattgttgattgcagtttcaaccaatgcatatgcttgttgagcttggttcttagcttgaacatattcgttcaagttgtcatcaccattagtaagcacacgtgcaaatgaaatttgttcagccatcaagaagttgaacaatgaatcccacttcttgtcttcaaacttgatttccttagcagaaattctaggcatcatttcacgtgtggtattaaatgccttttccaaaatttgttcatctgcatcggttaattcacgcacattgtatgcttggtggatttggtgaacctttaaaagttcttttaataaagttcttgcttgtgcatcttttgaaactgattggttaatttttaaagccatttttacctactcttttcttttttattaacaattataccaaattgtcttcgaccatttgcttaacgcagcgtttcatttctttaatatcaagaatactgtaggcaaattcttttctaagtagttcctttggcaaatattgatcgtacttgtcgattcctggcacttcgtttggataaaccagatcaagcggatcaaagtctttatcagcttcttcgcctaaaatgcgccagaagtcatgctcatcagcatccatggcaaaatacatgaagtatggtctagatgaattaaagccacggatatttaactttttaccgcacttaattcgaattaatcgctctagtgccaaaaatgcataagtcccagtccatggaaaaagacaccacatattaccgcccagcttgatcaaattattctttggcagaccagctaaagcggcggtgtctctagcttgcgtcaagcgagctttaccattttgcatcaaatatggatacatcatcttttctgcaagtacctttttcattctctgtaaaattttaggttgaatatctccaggtacatctccaaagtaggcaggaattctaccctttacttcatggcaatatacttgatgacgcttgatatccacgtcttcgacaacccatacacgtccagcaatcgcaatcttgtctcctacaggaggtggcttaacgatcgtacctaattcttcgctgccagcgtgaacactgaattcctcgttttcttggaaaactgcgtaaaatttaaagttattcacaactcgttcaccagcaagaccaacgatcagaccaccatcttcagtccactcaatgtgacctgttttaagcaagtgtttgagcaaaacgcgataatcgtcttggctcacgttgtggaaatatgacaaagttaacacccgtgaagcaagttcagctggcgtcatttcaccgcttgaagccagcgtactcatcgtctgatgatagagcaaactatatggcaaacggttaggttcaggtggctccacccatttttcttccgcatacagttgtaccaaggcaatcccttgaagtagcggccacggaatcagttctggcaacatcgctcttgattcagggtgttcttcgcgcatgacaaagtgcatctctggtggattaccgcggcgccctgtccggcccattctttgtaaaaagccagacacagtaaatggcgcgtcaatctgaaaagcagattctagtttgccaatatcaattccaagttccagcgtagctgttgcacaagtcgtcatgtagacatcgtcatctttcattgcggcttctgcagtttcacgcaaggctggagacaaattaccatggtgaataatgaagcggtctggctcatgattataggcacaatatgctctgagctcctgacaaacagcttcacattcttcacgactattggtaaaaacaagacactttttaccacgagtatgctcaaaaatatagccaattcctgggtcagctaattctggtgccttatcagttttcggttcgatttggctcggatcaaagtccctggaacttgcttgtggatttgttttataaaaatgttccatagataaatgccaaatctgtggttcattttgtacccttggtgtaacagtttttctgtttgaaccagcacccaaaaacttgctggcatcttctaaattaccaatagtagccgaaaggcctattctccgtggatttacattagctagttttgataaacgctcaattaaacaaaatgtttgtccaccacgatcacttctaagaaatgaatgaagttcatcaaccacaatatattttagaccaccaaaaagatgcggaatatccatgtgcttattgatcataaagctttcaagcgattccggcgtaatctgcaaaatacctgaaggatgcttgagtaacttgcgcttttgtgtttgagctacatccccatgccagcgccaaactggaatatccacatctgtgcataagtctatcagacgatcgtattggtcgttgatcaaagccttaagtggcgcaatatacagaacttttactgaatcttctggctcattataaatttccgacaagatcgggaaaaaggctgcttcagttttgcctgacgcagtcgaagccgacaatagcacattatgatcggtgttaaaaatttcttcggccgccgcaacctgaattggtcttaaacttttccagccatgttcatagatataatcttgaataaatggcgcataatgtgaaaaaacgtccatagtccatttccttaaatcttaaattcggtataatccttttccacattatccgaaacagcctctgacttggtatagctgaattgatccgagttaagcagatcagtgatctttctatcaggattctgccaaacaatgtcgagcagctcaataaagtcacgaataatttcacgtggcgtgatattggtatccgctccaacacgggcatattcaatcttaataaattgagccaaatcatcatcagtaatcgtgcgctcataaccgtacaaattggcatgcatgtcagctagtttttcagtcaaaaccaacatttcttcagcggttaatggttcaagcttaattactggcgcatacatatcacgtgctccttcttgagcgaatttgcctgaagcaagtcggctgcgtaaagcttcgtatgaataaactccgcgacgacggtctttaactgcttgtggcgtaccacacataataatgcctaagtaccttgctttgccctgcaaggtatcgttgtacatggtcaaaatcttttcatagttgtactggcggctaattgtattcggaattttataaatattaaccaattcatcaatcataatcattaaaccagcatagcccgcttgtctaaagaaagtcgcaaataactttaaatattcataccagtcactatcaccaataatgatatcaacgcctaattcctttttagcctcagtcttatggctatattctcctctgaaccacttgactactttagccttagtctcatcatcaccactcatataagcgtgatagtacatgttcagcaatttagcaaaatcaaaaccatgaactaattcgtttaatgaagaaatgacgccatagattttttggtcaactgcttgctcaaatttaggatcatcattatttaagcctgtttcttgcgaaacttgcatctgcactgaattaatccagcgatctagaatcaaagtcaaggcaccaccttcaggcctagtcttagttgataagttctgaattaattcacggtatgttgctaaaccctgtccttttgatccttgcagccgacgttcaggtgataaatcaccatctacaacaacaaaatttttatccatcacatagttacggatcgtttgaagtaaaaaactttttcctgagccataacgacccacgataaaacgaaagcttgctccgccttcttgaataacatccacatcgtgtaatagggcctcaatctcggcctttctccccacggtaatataaggtaaccctattcttggcactaccccaccctttaatgaattaaggacagtttgcgcaattctttttggtactcttcttttttgtggcatgatttcatcccttcaaaaacatatcttttaagtcatctacataatcggtaattacttgtggttggtcctgttcgttattttctaaaaccacatcaccgaattcatcaaataatttttcattaatattatccatcaaaattgatgccattaaatggtgctgcttcaaataggtctgccaaggctgctgcatcagcaatgcagttaagaaaaacatttcattttcatctaagccataatcattatcaactttgacagtttcatctgcttgtttttctacttcttcttgtgcttctgcctgctctagctgcttttcctcatccgttaacaaactatcacgcgtcttcgaagcattggcccgaatttgatccaaatcggaaaaatcaatcttaatctgatcaatctgcgcctttttttcttgaatgcgatattcagcaatccccgcgttaattgccttaagtacagcttgatcaataaatcgcggcttaatcgaccgacctagtttaaattctgttcgcgccactctatctaattcatggagaaaattatttaaattaacccgctgacggttgatttgttgatcacaatgaatttgccattttccttggtaaaaatgatactttcttactgcatcaatctgatggtcagctacttgttgttttcgcagataaaaaacactgcctacaaagattggcttttcaattatatcaggcttgcccacaaacgcactgtaatacgcaatgccgtattttttagcatccagcagctccagccacacgtaacgcaacagttgaacaaataacttttcattcttattaataactttagatgaattccaataagtcgttttctttgcaaagactgctgctaactcttgcgcagtaaatttttctggatggtgtaaaacctcataatcatgatcacgcttaatctcagatgcaaagcgctgcttaataatcttttcgtctaaatcataataaagaacataatctttgagccagtcttgtaaatatacatcaatactaatgtcaaattgtcgcacatatttttcttcaaattctaacagcttttcatatccatcttgtgcgtcatcaacaccaatattgttcagtaattcataaatataaacaaaggcataggatgtactcgttttttcaaaaacatgctggcgaatcttgctgcgccaagtaaagtaacttctaagctgcccagtattcatatcatgataagttggataaaaacgcttaaaggcaaaaaattcaggataatcatcatcatagtcggccatcatcctagcctgttgataaaaattcttagctcggccacgactgggcaaaatactgtagtcataaacttctagcatctttctaattctatctggaaccagactattgttatgcttcttgcgaagattttcacttggtttaattgcttgggcttgatagcggtcatctactttatctggtgcaatataaaaatattgattctgggcgatatttacttcatcaccattcatcgccagtttaaaagcaaaatcaagtgcttttttgagtgaatcttcactaactttttctaatattgtcccaacccaatctgccgccttgatcttcattggatcagtgaagccaggcaaatctcttattagtgcagccattgcaccacatttcaggtccaatatactctgaccttgcccacgtgataatatcgcaaaataaccactatcaactggtgacattaaaacgtaaacgctagtggaacctggtacagcaggcttaaatttcaaaccatatttggcatagacatatttgaagagttgatttgaatccattttgtctccttttttcgcacgtacgttcattatatcatcgatttattttttaccaaagtcacgcatgtcagctcctcatgtatatttttaagtttcataaagtttatatttttatatttgtgtggttattaacaaacaattatgttactatagtttatgtaagttattgaaagcgtttttataaaagcttcctagagaggacaaaaacttaatatgagtacaaaagaatgttattctcaagatgaattaagaaaagataatccaatgtttagccgcactcgtgccactattgaaagtgcattttacggcaacaatgtccacgaagtaaccagtgttgcagaagcttataacttagctaagaagcaatcaggcgttattgttactgacttgccaatcttacacactaaggaattaggtttgccacatggcgcaacccaattggtttacaaccacggcaagattttaggtagaactgctagcgcccgtcactttgttgccaatcctaatgaagatgctgaagcattggacggcaacctacgtgaagatatttacaagggtcatgaacaaaagtacttaaaggctactgttttagtaggtcttgacccatcattcactgttaaggctcacattatgatgccagaagatcaagccttcaaccttctttcatacatcctcaacttccacttcttcgacgatgaagctgaaaaattatacgaaaagtcaaagttctacgatgaaccagacatttacttctacttcgatccaaatgttcaagacgaagattaccctaagggcttaggcgtatttgacgctccacataactgtgctgctgtcttcaaccttcgctacttcggtgaacttaagaagggtactttaaccttagcttgggctattgctcaccgtcacggctacactgcatgtcacggtggtgaaaagtcattccactttgacgataaggacgacaagacctttgccttctacggcttatcaggttcaggtaaatcaactttgactcatgaaatgtacgatggcaagtatgacattactgttttgcacgatgatgctttcattatttcacgtgaagatggttcttcagtagccttagagccttcatactttgacaagactcacgactacccagcaggccaccacgagactaagtactacaccactattatgaactgtgatgtaaccttagacaaagacggcaagaaagttatcgtaaccgaagacttacgtaacaacaacggtcgtgttatcaagacccgctacactagtcctcaccgtgtagactttgaaaagtcaccaattactgcattgttctggattatgaaggacggttcattacctccaatcatcaagatcgatgacccagtattggcaactactatgggttgtactttagcaaccaagcgtacttcggctgaaaacttacctaagggctttgacatgaatactttggttattgaaccattcgcagacccattcagagcttacccagtttcaggtgactacagagacttcaaggaattgttcactaagcgtggtgctagttgctacagcttgaacaccgacgcatttatgggtaaagacattcctaaggaagttactaagaagttaattgaagacttagctaacggcaatatcaaagacagtgacttcaagccattcggtaacttcaagggtgtatcatacttacctattgatggttatgaagttcaccttgaggacccagaataccaaaagaccttagctaagagaatgcaagatcgtttgaactggctcaacaagtacgatgaagaacacccagaaactccaattcaagatgaagctaagaagaccttggaagctatcatcaaggaattgagctaatattaaggaaataaattagtgtctcattcaattaaaatttaatttcttaatgacgaaaagacgagagttgaaattcagctcccgtcttttttattgctcaatgtaattttgcttctgtagtttggcatctatcagtttataaacttgcactttattctcttgtgcaagttgtggattatagttatgtgctatttcaatgacaatagccggcaattggtagattatcttatgaatggcatcactatttttagggtctaaacttgaacaaatctcatcaagcaaatatatcttcttagaacgaattagacctctaactaaagcaagtcgttgtgcctgaccacctgataaattgttcgcgtcatctgaaattaatttatctaaaaaatcattgccaaactcatgaatcagtcccatcttttttgcttcatgaagcattagatcatcaggtatgttttgcagaagtgatagattctccctcactgtaccttggaataaccagattctttgcgagatcttgatgaaatcggcaggattaatttgatgaccagcaaaggtgatttcaccgttatacttcagattattagcaatacaattaattaatgtacttttcccaatgcctgaagccccagtaacaatgatcttgtcatgatcacgcaaagttaaatttataccatctaaaattttcttatcaccatatgaaaaagacaaatcttttattttcaaaatagcttgagagtcatgattatcttgtttaacactttcactttcttcaaaattatagctttttatttttctaattgcatcggtgctatgaatttgagtctgatacaaagcaattgttcttagatatcccacaaccctatcagctgacaaacttaaagttataatggccgctaccgttacgttaaaccagcctctctgcataaaaagcaagccaataaaaattggtagcaatagtgtaactaaagagattaaccatgcaatgaattgtacctggaattgacaattattcatcttacgatatttgtcttcctcattaaccaagattcgatcaaatcgtttaaagaaaagatgtctgacaccaaaattcagtatttctaagcgtccttcaaatatatccttcattgcctgaatcaactgtgagttagatttattccatttttcggttttctcattcatcctcttcttgccaatatagcttggaatcagggttagcgctgaaagaagcaaataaataattcccaaaatcagattagtttctacaacaactattgccgatgcaaccacattaaatacaaactgaactatgtcagttatcccaaagaaatatttttgttcaatttctttagcagtaccactaatcgaattgattacatctgctcctcttgcttgcttcatgtctgaattagcaaatttagaataaaaatattcttgctttaaagcaatatttaatagcatcacaattctattttgaaccaaataaaacaagagcatggctatgtagactatcagatatgcgccaaaggctaagccaataaatttataaacgtggtcaatgttactaaaattgatattagttaattgtccaaacagtacagcatttaataccccttcaaatgctgaaatggccgataaaaccagaaaaactatttgtaaatatattggaacatgttttactacccatttaaaatttatttgttgtgtgttcattgtttaatacccacatatttctcataatcaacaagccaatcttcatcatttttataagaatgattcatacactttttaaacccaattgctttaaatcatcttcatctttagtttctaacaattgtcgctcttctagagacaagtgatacttattcactaaggcatcaatattctccaaagaaatatttttaccatcagaaagatcctttcttcataccttcagacattactatacctcctattttctctcgttaagtaatgcataattttcaacttgcaatttactgtgtatgggattgatatcaatgcttcccataattccccaaatgcttataataataacagtaagtattctcttattttttaatttcaaagccaggaattcattatgtacggtcaaaaatttaaagcacttcgtcttcaacaacatatttcactagagcaagctgctaacagagttatctctccatcgactttatccagatgggagaataataagattgatattcgcttcaatttagttattaagcttttagacaatattcatataaacctaaaagagtttactaattactgcaaaattaatcatagtaatccctttgttgcgaaagtggctatgtactatgaagccaacgatgatcgtcatattttgcaattaatacaaagcaagaaaaaagaataccaaaattcacataatcaatttgatttacttctactagctatcgcatgtaattgttattacgatctaactgataacaatgttttcccagtgagctatcaaaagaaattattctacattttatctaacattgaatattggacagagatgtacatcaatgtttttggtaacactgtttttctctatgacagcaaggaactatatagtatttcaatcagaattcttaaaaatttaaattctaatacatttaatgattttcaagaatattattatgctttatcctctgtcatcaacgccctaaccgctctaattatcaaaaatcccaaattagcatcacagcttttaactaaaatagagaaagtttcaattcctaaaccaatctcttacttaaaaattagaactaatgtcctcaagtatcttttagattaccgtttaggcaaaacagatgaaaagcttatctcaattaagctagaaaatttaaagtggttaggattaacagatattgcaaaagacttaactttcttctttaaccgtataaaaaatgatcgttcacctctttcctaattcatttgcctattatattaccctcatttttatctaattgatttttctttgcaaatatgcaaaattatttttagcaagaataaaaaagcctattaaatctaggtgtttacaaaccctgatttaataggtcttttatgcgtcttttttattgctcaatgtaattttgcgccttagttaaaatatccatcttctcatgttcagttaaatacttttgtgcttctgccaaattgacccatttactagctaaaatttcttctttttgaatgttaacctcttgtcctgcaacatagctagcaacaaaataaactactgtcttagctttatcaacagtcaactgatattctgttttttctctaaaagtaaagtcaaaattcggctttaaaccaacttcttcaaaaacttctcttctagcagcttcctcagctgtctcattattttctaaatggccttttggaaagccccaattatgatttacgacgctctgcacgatcaaatatttcagctcgccgcttctacgttctctgtaaataactgcacctgcagaatgttccatcttcatttttgtcacccaacctttatattgcataattattaaatatttattaacgtatgtcaagcaattgtaatcaaaaaaatgaccagatctttgacgatctagtcactttattcgcagacgaaattattaagttctattggtagaatattttaagttacttcttcaagttcttttcgcagtattccttgaccttgtcatcatcggccttaagaatccattcaactgcagcctcagtcttcatggtgtctcgaccatttacttccatttcgtggtcccaaatagcgtcacgaataggcatttcattacccttagcccagtcaaaaacttgatccatatttctatcaattaatgcagtttcttcaatttcttttgcatctgccataattaaaagcttcctttctgataacgactttattgtagttctattagctacaactgttaacaaaaagggacttttttatttaaattctaatttttgccattaactgcttcatcagccttattcactacactaaccgcattaagtgaacgaggataaccaatgaatggtacgttttgttcaatgaccttcatcaagaattccttgtcattgcctaatttgatatttgcttgagcatgggccatcaattgaggttcacagccaccttgagctgcaatataacagaaggtaatcatttcacggtcattgtcatccaagccttttctagtgtagtaatcgccaaagcaattatcaactaaccacttattgattgttcccttcttggcaaaacccttcatttgtggaccaaacaagcgcatttgagtttcctcacccttttcaaggcgattgtctagtgtagtagttgcttgacccgcaagaggtaattcaacgccgcgcttagttaaaacatcattagtaatcttgaaaaatggggaaactctacccaaacctaaataatcaaccgcttgatataaacttccttagcttcaactgggttaacaccattgtctagtacgactggaagcattatttcatattcttccttgccttgcatccccaacaaataagctaaagttgacaacatcttagtccggtcgggcaaatcaacgtctttttgcacttcgtcaaaagcaaaatgattaattctttccaaagcttctggatcagtagccttcaataagttggcatgtactctttatgcatcttctttaattgacataataaattcctttctaaacgcttatctctactatttatttaagtacgattgagtctaaaagaaaaatatctattttttattctgcaatataacttattcttatcaaaaaaatatcctaaaggctttttgccttcaggatatttctattaggttatttaattagtttttcttgtctgcttcagcatcatggtatgacttaacgatttcatcaactaattctggatcatctttcaaatcagtagtttctacaatgacatccttcaagtcttcatctttaagcatttgcatcaacttaacgctttccttgtcgttaggttcatcaaagtgataaattctaccaacagtttccatcaatgcactgtagtccaaacctctgtccttcaattcacggattggacggataaatctttcattgtagcctaacttacggattggagttctaccaacacgagcaatatcatctgaaatatatgggttttggaatctgctcaaaatcttgttgtggtattcttccaaactttcttcggtgaattccttgttccacttgtggtaaagaagtgaacgggtttcactcaagacacgcttaacttgctttaaaacaaatggatccttaatagcatccccaatagtgtcatagccaaggctcttgccagtataagcaacagttgcgtgtcccgtgttaactgagaataactttctttcgatgtaaggttcaaggtctggtgcatagtcaacgccctttaacttgatatccttgttcttcatttggctttcgtcaataacccattccttgaagtcctcaactgagacaaacaatggatcgtcattatgttggataggaacaattctgtctacagctgcgttagggaagccaatgtacttgtctagttcaggcttaacgtcatcgtccaagtgcttataaacttcttcttttaagtgttctgaaccgccaatcatgttttcacaagcaatcacatcaagtggagtagtgttgcctgattgaattctagcagttaatcctttggcaattaatggagcaatgattgccaaaatctttggaccaatggcggtagttatcatatcggttgatttaattgcttcaactaccttgtctggatccttagcattgttaattccatcaacatttgaaacatgaattctcttcttaccaggtgcggctaattcaatgtcatattcaccacgcttgtttaattcatcaataatagtttcattaacatcaacgaagtcaatgccaaaaccattatctgctaaagtttcaccaataaatccacgaccaatattacctgcgccaaaatgtactgctctcatgtttaatctcctacgttctttaataaatcaataatttcttctggtgtttgtgcgtctgcaagctttgcaacgttggaaacatcactacagaaaatagcaatctgtgacaaaatatttaagtgttcattgttcaaaccagcaatcccaaagacaacggttaccaattgctcggtatcatccttagggtcactaaaatcaacgcccattggaatttggactaccgaaattccagtttttttaatgtgcttcttaccttcgtcagttccgtgagggatggcgatgaaattacccatataagtcgacacatcttcattacgggcaagcattgaatcaatatactctggttcgacacagccgccatcaactaataattgaccggccattctaattgcttgatcccgcgttggtacgtcttgattaagtttgatcatttttggatctaattgtaatgccatttagctcatccctttctaattcaacttttgaatagcttcgccaagctttttatctttaagtaaatcatcaacaactagggtttgaatatcactgtatctgacagccaagttcttattagcagctggagtaacaattactaagtgacttggatcatcagtcaattcgttgattcttactgccttaacaggagtagtcttaccagccttcttaattgcgtcattgaataaactagttgccatagtagcggtacctaagtgttgatcgtgacggatgaagtccacttctttaactttactgaagtcgattccttcaagtgaaccaaccttcttaactggtttttcagcctttggcttatcttctacttgagttaaagctttgaagctagctacgattgtgtcatatttcggactactcaagaagttgccaaccgccacgtgcattgcatgtggagtcttttgtaaagcgcggtcagctaattcttcttgcgtgatgatcaacaaaccatcttcatctttcaagtttctaacagcggtattggttactgaaaccttaatgccagccttcttgaatttatcacgcaaaagtgaagcacccatagcagatgaacccatacctgcgtcacaagcaaagataattttcttaacattggcatatgacttaactgattcatgtgcatcttcagcttccggcattgattgacctttagattgggccttcatggcttgcatttgggcttgttttgcttctaactcatcaccagtactcttgtcgtttttaagaataattgcggcaataatgaatgaaacaactgcggcgccaagaacaccaacaatattaccgaaataagcatcctttgcggaaacaagcaagatagctaaaattgaaccaggtgaagcagctgcttttaatccaccaccaagagtagtgaataagaaagtaccagtaacaccaccaccaatagcggctaaaatcaatgatggtttcattaatacatatgggaagtaaatttcatgaaccccaccaaagaattcaatgatggcagcaccaggagctgagctctttgacttacccttgccaaataaagtaaaggcaagcaagattccaagtcctggacctgggtttgattccattaagaacaaaactgacttaccaacttgtgcagcttgttggatacctaatggaactaagatcccgttaccaatagcgttgttcaagaacaaaactttggcaggttcaataatgatgttggctaatggtagtaagtgaactctaataattgcatttactcctgcactagcccattgactgccaacttccataatcggtccaatgataaagaaggcgaaaatcgcagcgatcatgcctagaataccaagtgaaaagttattgtagatcatttcaaaaccagatttaatcttgtcctggaatacttgatctagtttcttcaataaccatgcactaagcggacccataatcatggcacctaagaacattggttgatcagtaccaacaattacacctaatgtaccgattgcaccagcaatggcaccacgttcttcataaaccatgcgaccacctgtataaccaattaacagtggcaacaggtaatgaagcattggttgaactaagttattaatttctttgttagggaaccaaccgtgtggatacataaagaatgcagcggtaagtccccaagcgataatggcaccgatattcggcatgatcataccggataaagctgtaccaaatttttgaaccttcactttaacagaagatttactttttgcttgagccattttcttcttcctctctcatcaacttacatttttattctaagtcaatcagtaagcgcttacaatgaaatgaaaatagaactctggcacacttttgtgccagagtctgagtttacctattctattaagcttttgaactattggttacctagtaaccgatctttgaggtcttgtaaaaaaagtgccgcaattgcttctttaatttctttttgactgccatttgtaaataaatctaagttttgactagacatgataatcatgctggaaatagtactcattacccgctgttcgggtgcagtaagattgtctggtgccagcatcaaaagaactcttttgacttgaatggtatcatgatccattgattggagcgagatttcattatctaagtcaaacatggtaaatgaacagcgtgtaatttctggactacgtgtgtgtagcaatgcgatatggctgttagggatgccaactggtgccattcgtacacgtttgagaagatttttggcaacgggcatttgcttacgaattagtgttgaatccgaatgggctaaacattcctgaattactgcaattaagtcttgcgaattgtattccagttgttgaatcttgattccgttgactagctccgagcaaaataatgtactaatcgatagcttagcaagttgttcgactgaatggggatgtttttcttcaactacctgtttagctggaactggttgaggatatttttgttcataatcttttaagtaagcgcggatttttattaattcatcatcaagcagtaatggactaacaagtaaataatctcttgagaagcccttcaatctcaaggttgaaaaaataagattgtaatttgacaagtctatttgatttaaggcagaaacacggctggttttgacttctttgatttcagaaaattctctttttagtttggcacctaagattgccgacgttccaatgccattttcacaaattactagggccgataaattacgctgctgattgcgactcgtgtattcattggcaaaataaagcaagatcaactgcaactctgacgctgtcaaataattttctggaaacgctaaatgccaatatttttgaatagctagatataaatcaggaaacttttgactaaggcctgccagaatttcaataggtgtatctggtaaaagagctactttatgttgtactaaaccaataacgtgtttcgtcactttagtcataaaactatgatctttttgaaaatcccaatgcatttcttcagaaacgtgttgaacgaattcttttactttgactgagattgctaattcgcgctcattataagtcaagtaagtgttgtgataatcacatgataataacttattagctaagtatgagacatcattttggtcaacctcaacttgccgcttttgcgcaaacaaggccataaaacggtaaacataaccctgatatttaagtgaatcagcactggggtggataaaatctagcttgcatcccgccagagttctttttatcgttaccgcaaaagttaaaattaactcaatcagcttttggtcactgtctagcttaattttaccaaacacgctttttttaagacaatcagcaacctctactagcaaagccttatcaatcattgtcaaaaacatgtctttgcttgtcgtttcattatgcagatacttaaaaaagttatattcattgatctgattgagcataatatcaactaaaacctgacgccgtattttttcaggcgcctgaattaacagtcccacaccctttttgcggatcaagtcaatatgatatcgttttagcgacctttcaaccgtattcaaatcactttgaatcgttgcttcactgacattcaggtcaagcgcaaattgaataattttacatggctccgtacttaaaagcaacttagctgcaattatcttctctcttttagctaccgaaattacattttgactgtgagattgttgcacagattgcttaatttcttgtaattgctttgaatcgccagataaaaaatattttcctttttgattttcaattttaaagtcgttcttctttaaatcgccaaattcgcgataaaccgtccggcggctgatctttagactctcttcaatttgtttgatacttaccccactcggatttcccaacaaaatttgaagaatgtgcttttgccgttgtgttaaaaacatcccatcatcctcgcttacgtttaagtttattatacttgaacgcaaaaaaagaagacagatctcaaatctgccttcttgaggatatttatttacatattaattattcaacagtaacactcttagcaaggttacgtggcttgtcaacatccaaacccttatcctttgaagcgtagtaggcaagaagttgagttggaactactgtcaaaagtgctgacatgtagtaattaatttctggcaacacgatcgtgtcatcactatttgcgaattccttgcctacaatagtaattactgaagcaccacgtgaagcaacttcttgaatattaccacgagtaagatctgcagtaactggatcgttaatcaaggcaataactggagtgccatcttcgatcaaggaaatggtaccgtgcttaagttcagctgcagcaaagccttcagtttgaatgtatgaaacttccttcaacttcaaagcaccttcaagtgcaacagcgtgatcaataccacgaccaatgtagaatgcgtttcttgattttacaatatattgatcagctaattccttaagcttttctttaccgtcaacaatttgttggataccttcagcagcgatggctaaatcatgttgtaagtcccaatccttagcatcttgattaccaagtttttcaccaagtgccttagctaaaatagcttgtaaggcaacttgtgcagtgtaagccttagttgaagcaacggcaatttcaggacctgcacctaaaagcattgtgtagttagcttcacgtgataaagttgagccttcaacgttagtcatagtcaaacttggaataccacgcttgttagcttccttcaataccacgcgtgagtcagcagtttcacctgattgagtcaagaaaataaagaatgggtgcttgctcatcattgggaagtggtaaccagcttctgaagcgtaaccaacttcggtaggaataccagtgtagtgttcaaaaatagttttaccaactaaacctgcatgataactagtacctgcagcaaagatataaaggcgatcagccttagaaatagcatcaataatatcttgatctacctttggttcaccattttcgtcaaggtagttttgtgacatgtgacgcattacgcctggttgttcatcgatttcttttaacatgtagaattcgtaagtaccctttgaagctgcgttagggtcgatgttcaaaacgtgaggttcacggtctacctttttgccatcaacagtttcaatagtgtaagaatccttggtaatgtcaccaacatcaccatcttgcaagtcaacaaaagtcttagtttggtcaagaacagaaatagcatctgaagcaatgatgttaaagccatcaccgattcccagcatcattggtgacttgttcttagcaataaatacgtggtctggttctgtgttgtcaacaagcaagaaagcatatgaacccttaaccaacttcaaagcttccttaaatgctgaaaaagcgtctaagttcttatcacgtgcaattttaccgatcaattgaacaactacttcagtatcagtatctgagtggaacttaaccccttgcaagtacttttcctttaattctgtgtagttttcaatcacaccattgtgaactagatagaaacgcttggtttcatcaaaatgagggtgagcgttatctacagttggcttaccgtgggttgcccaacgagtatgaccaataccaactaaaccttgttcatctggagtcaacttttccttcaagttagaaatacgaccaacagccttagttaagtattcgttaccatttaaatcatttaagtaaatgccagctgaatcgtaaccacgatattccaagttggttaatccatttaaaataatatctcttgcaggcttacctacaactccgacaattccacacataattttctcctttggtctagtttgctttgaagtaatggactagcttatttttattgttacagtaggtataatagtctttttgcaaaaatcggtcaagtacaaatattcaaaattggtattataattttaagcataaaaaatggctaccagaatttgctccgatagccatttttacttaagtcaattttaacttttattacttgtttttgatacccttaccttcatagcagtctctcatcaattgagaaatttgactaattaatggagctgatgggttagtaacagtgttttggtcgccataagcttcaacagctaattggtccaccttcttgtcaaactcagccttatcaacgccataatccttgaaggccatcttaataccaactgattcagccaaatcaataattttctgaactaatttttcaattaattcagcatcacttgaaccagttaagccgattgctctagcaatttcagcatagtcgctttcagcacggtaaactgagtaatgtggccacatagcaagtttttctggacgcttagcattaaagcgaatgacttgtggcaaagcaattgcgtcactgacgccacttggaatatcaaaagttgaacctacggtatgagcaattgagtgttccaagccaaggaaggcatttgaataagccattccagcaatcgtagctgcatcatgcattctctttctagcatcaagatcgccatcgtaagacttcttcaagttagcgaaaattgctttaatagcttcaagtgaccaaccacgagtgaagtcagttgccatggttgaaacataactttcaattgcgtgacctaatgcttcaaaacctgaccaagcaattaaacgtttgggcagcgtttgcacaaattgatcatcaacaattgaaacatcaggtgttaaagcatagtcacataaggtatgtttaattccagttttggcatcggaaataatagcaattggggaaacttctgaaccggtacctgaagtagttggaatacatacaagttggacaccattaatctttgggaaacggactactctttttctaatgtctaagaatttttggtaagcctcttcaaaactcatttctgggttttcgtagaataagcgcattgctttagcagcgtccattactgaaccaccaccgatagcaattacaacgtctggcttgaagatgttcattctgtgaacaccatccttgatcacatcagtattaggatcaagagttacagccttaaagacttcatattctttttgacctaaacgcttagaaatgatatcagtaacttcatcagcaaagccttggtcagctacaccttcatcagttacgatgaagaaacggttaacgtttggcatgtgacgaaggtagttagcagcgttatgttcgaagtaagtctttgatggtacctttacccattgcatgttatcacggcgtctagccactgttttgatgtttaacaagtccttagcaccaatgttgtgtgagaaggtattggcaccatatgaaccagtacccaaggtaagtgatggcaacatattgttgtaaaggtcaccgataccaccgagtgcagctggtgagttgactaagatacggcaagcatccatcttcatggcaaattcatcaataatcttcttgtcatttgagtgaagaccagcggtgtgacctcgaccaccatagttcaataaatcggtataaatcttaaatgcatcgtcatggttcttagcacggtacaaagtgaagactggtgaaagcttttcagctgatagtgggaagtttctacctacgcctttatattcagcgataattactttagttgtctttggcacatccacaccacaaagcttggcaatttcataagctgacttaccagctactggaccagcaaccgtaccacgacgaggatcaataaagtgttcctcaaacttcttaatttctcctttgtttaagaagtagcagttccacttcttaaattcttctttaactttgtcataaatttcagtatcaacgacaactgaattttcagaagcacaaaccataccgttatcaaagttctttgataaaacaatgtcataaactgcacggtcaatattagcagtcttttcaatgtaagaaggaccattaccaggaccaacaccaatagctggcttgcctgatgaataagcagctttaaccatacctggaccaccagttgccaaaatagtttgaacacctgggttagtcatcaaatcggtcgttgcatcaaggcttggttcttcaatccattgaacggcatccgcaggagcacctgcagcaacagcagccgcacgaatgattttaccagtttctacacaacatttttgagcctgtgggtggaaaccaaagataatggtatttctcgtcttcaaagcaagcattgccttgaaaataacagttgaagttgggttagttactggagtaacacctgcaataacacctttaggttcagcaatcttagtcaaacctaattccttgtcttcttcaattacgccgacggtcttttcgtgacgcaaactgttccagatattttctgaagcatacatattcttggtagttttatcttcaactacaccacgtttagtttcttcaacagccattttagctagtgggtaagcattttgttcacctgcagtagcaactgcttcacagatcttatcaacttgttcttgtgtgaagttagccatttgatctaaagcgacatgtgatttctttactaagttatcgaccatgtcgtagatttgctttttcttttcgtcctctgtaagagtctctttttgttgtgtcttagccattgtattattacctctaagatctactaattcttgtgaactaatttacaatgtcaactatagcacaataactttatttgtaaatgcatgaatttatgaaaatagtgaattaacaaagattcacatttcctcataatttcgctctaatgcaaatgaaagctattccttaattatttgtttgtgaattaacaaacttatttttaaaaaacagatttttgatatttttttaaatctaactatagagtctggtcatactaattgataatgataaaatattaagtatatgtgaaaagattgagaacattggggggcttatatgagtgagaaaaaaacacagaccgcttctggttataaacgaaccctaagcaatgcacacattcagttaattgctttaggtggaacaattgggaccggcctttttctgggggttggagacagtattcaccgcgccggtcctagcgttatcctgatatatattattgtcggtatcttcctcttcctgctaatgcgggcactgggagaactaattatgtccgacttgaacaagcacacatatattgattttattgaacaatatttgggtaaaaatattggctttatcacaggctatttgtattggttaagttggattaccttgggtatggccgaaaccacagccctaggaatttacttcaagtattggtttccaacactgaaaccttggattccaggaattattaccattgtgatcttgctgttaatcaatttaatttcagctcgtgtctttggcaacttggaattcagttttgccattatcaaaattgtcacgattattgccttcgtcatcttgatcctttacttactagtaactggtggcaaaaccagctttggtcctgttagctttgctaaccttgacgatcatggcggcttcttcgcccgtggcagtaaaggattcttacaaggatttcaaatggtaatcttcagctttattggagttgaattaattggtttaaccgcggctgaagcacaaaagccagagacaacgttgaagcgagcaatcaatcaattaccaattcgaattattttgttctatgtcatggctattttaggaattttgttagtaattccatggtccaaagttgctactaacgctagtccatttgttgaggccttaggtgctactggtattaaaaatgctagttctattattaattttgtagttatttcagccgccgtctcatcaactaacagttttttgtatagtgctggtcgattacttttctctgttacttttgatggtaaaggaaaatggaacaaaacttttggacatttatcaagaaggcagcttccacaaaatgcattgattttatccgcattattgatgggatgtgcaccactaatcaccttggttattggcgatcaggcctttaattttatctcatcaacttcaactagtatgtttttaatcatctggagtttgatgattttaactcacatggcttacaggagaaaaacaccagctaatcagctaaacgattttcaaatgccaggttacccttatatcgattatgtaatcttgtcattcttcgttttaatgattatcctgctattgattttaccaagctaccgagtaccaatggtcgctgcaattgcaatctttattgttttatacatcatttccaaaatttggagtaatgaaaaagctgtttaaagcaaaaagtcgagttttttagctcgaccttttattttgcaatttttttaattattttagcaggatttccggcaactaccgtattagctggcacatctttggttacaacggcattagccgctacaacggcgtttttacctaccgtaacgccaggcaatatcgttgctttagcgccaatccaggcgttttgtttgataacaactggctttaattccagttcttttctatgctgtggatccagcttgtgattaactgaaatcaggtaggctccaggcccaatcaacacatcgttctcaattgtaatcccgcctaagtcgaccatcatcacattggcattaataaacacgcgctcgcctaatttgatgttgtgcccataatcagaataaaatggtaaccgaatctctatactagcagctattttttgaccaattatttcactaaccaattgtctaacttcacagctacaatgccgttgtgtatttaaattctgcaataatcgctgattctgttgggctagttttcgacgtaaatcgtgatcttctgtttccattattaccactcctttttcttgctctacttcagtttaaagggtaagcttatcaatgtgcaaagcttataaggtatgaagtataataacaattgtttataggtgatttaaatggaattacgtgttttaaattattttgtcgctacagcgcaagaattaaatatgacgcgagctgcacaaaaactattagtctcacaacctgctttatcgcgtcagatagcagatttagaggatgaattaggcgttaagttattcaaccgccagccgcggcacttaaccttaactcctgcaggacagtatttatatgaacaagcaaaagaaattcttactttagcttccaaaaccaagagtaacctacaatctagtgctgtcatcagtggtgacctaactattgctgccggcgaaagttttgccatgcaacgtctaatgaatatcgtcagcaacattattcgggattatcctacagttaaaattcatattctaagtggcgattatgaatttgcagaaaggcgtttaaacacgggtgcagttgattttgccgtaatcattggtaatctacctttagataattatgcttctctgcagctccctgagaaggatacatggggcgttttaatgactaaggatgatcctctagcaaaaaagagtgctattacagctgaagatttagttggacgaaacgtcttaaattcacaacaagctgaaaatcgaaagtactttgattcatggttcggtaattataaagagcaaattaatatcatcggtactgttaatttgaatttcaacggtacacttttagttaaaaataaagcagctattatgctcacactcgataagctagccaatatatcagatgaatccaatctaacttttagaccaattactccaatgttaaaacagccggtcacagtaatttggaagcgagaaaccaatttatcacctgtagctgatttattcctaaattgtttacgagcatcaattgatgacgattaacaaaaataacctagaccgaattgatctaggttattttttactttatttctttttacgactaaaacgttgcttcaatcgttgccataagcttaatgccctgcgcatatgatcagctggtacatattttcttattgctcgcaatacctttttgggatcacgtgccgcaaaaataaatttaccatttgacttagttctgatttcaaaacgcggaatataacgtccaccaaagcggatatctgcaaccacataagttacttcattccaaggaatctgaacataatcttcaacgtttcgttcgttataaaattcaaaagctctatcgccgatcatgattttgccgtatgatgcaattcctctaaaccaggttgcatcaacagtgagatcgacttttgtattaattgacttagccatttattaaagaatgccccatacgtggaagagaacaccgacaacgaagataccgatgataatccagattggtgaaactttcttcttcaataaccacatacagaagaaagttaagagcaaaccagctaaaccaggaattaattggttcaagttgtcttgtaaagtagtaactttagtactgcttaaagctttaccgttacccatatcccattgttgaagagcggattggatacctttagcacctgatggaagcttgtcccattcgatgtaaccacccttttgaataggagtttgagaaacaattggagtgaacttgatgtttacccaacgttcaattaaggcacccaagacgaacatacccatcattgaagcaccacgggtaaccttttgaagcataccacctgacatatcactggtgatagctgaaccagccttgtaaccaaattcttgtgtgtaccataagaatgcgattctgataatattccagataacgaagaacaagataggacccattacgttacctgcaatggccattgatgcacctaatgcaccaacaattggacgaacagtgtaccagaatacagggtcaccaacaccggccaaaggtcccatcataccaaccttaacaccttggatagcgtcatcagtaacttctgcaccgttagccttatcttcttccaaagccaaggtaacaccaagaacaggtgatgctaagtatgggtgagtgttaaagaatactaagtgtctttgtaaggcagcagataaatctttcttgtttgggtataactttctcaatgctggaatcattgaataagcgtaaccaccgttttgcattctttcatagttccatgaaccctgaaggaattgtgagtgccacataacgttaaaacggtcgcgcttggttaatttagttttcttatcagccattatataaatcctcctctatgcgttcattttaatagtcatcaatgatatcgccgagtggatcgccagtgccggcatcgccagaattattgtttccaccgttgccacccttagcttcaagagctaagtacatcaaagccattgaaaggccaatagcaccaagggcgatcaaagttaagtccttgatagcagcaagggcaaaaccaattgcgaagaatggccatacttccttacttgccatcatgttaataaccatagcgtaacctacggctacaaccatcgcaccaccgatagtcataccttcgtttaaccattgtggcatcattgcaagccaacttctaacagtacctgaagggattgctaaaagaagtgcagctgggatagcaattctcaaaccttgtaaacatacggcaatccattgccataagttgatcatacgccagttacccttcttagcttctgcgtccatgatgtgaacgatagcagttgaaatagtacgtacgatcatagttaagaacaaaccagcaacagctaatgggatagcgataccagtagcagtaccaatacccttaataccttgaccaccttcgatcaagataatagctgaagctactgatgctaaggcagcatctggtgcaacagcggcaccaatgttagcccaacctaaagcgatcatttgtaatgaaccacctaaggcaacacctaaatccaagtgaccggttactaaaccgatcaaagtacaagcaactaatggttggtggaattgccattcatccaagataccttccataccggcaagaaaggcaacaaacacaaccaaaatcatttgaatagcgttcatttatttactcctaattatttattactttttttcgtcaagtaaagtttgagccttcttcaagatagcatccatattacctggagcatctgaaggaacttttcttacatcaaacttaacgcccatcttttcaagttcacggaatgtatcaacgtctttttgattcattgataatacgttgttggcgttaacatcgccttccttatatgacattgaaccaacgttgatattcttaagatcaataccgcctttgatagccctcaatacatcttctggattttcaaacaaaagaagtgcatgagtgtttccaaatcttggatctttagcaatttcttccatcttcttgagtggaacagtatgagccttaacacctgctggtgcagcttcacgaatcatactcttacgtaaatcatccttagctacactatctgaaacaacaattactctatcaggcttcatagctggaatccaaccagttgccacttgaccgtgaagcaaacgtgaatcaattcttgccaaaacgtacttgatatgaccatcaccaataacagtaccttctggaatgctcttcttactgcccttagcagcagctttgtcagctgctggagctgcagcagccgtcttaggcattaagtcagctggcttagtcttaattccatctctaccaggttgaacaactgcagtggcgatgtgctttgcagttgcattagcatccatcattctctcagttaatgcttgtacaaccattggtaaattcataccagcaacaattgcccatttatcatgcttttcagcaagtccatttgcttggttaaatggagtaccaccccataagtcaaccaagaacaaaacttcatcctggttatcaaatgaagcaattgctttttccattttgccacgaatgtcatctggaccttcatcaggctttaagataacatgtgcaaaattatcttgttcaccgaaaagcatttgcgcagattgtgcaataccatcggcaaagccaccatggctggctaaaacaattcctaccatgtaatttcctcctctagatcaaaaaatgaattcgcttttattatacgataaatatagactttaaaaaagcgttttttgaaaataatttcataaagtgacaatttgtttcaactagcccaaatgccttgcctgacaagcaaagataaaaattggtctactaaaaaagaaagcctattttcatgaattgaattatttttcacaaatttggcttcctattaaaatatatgctggttgaataatttcattttcataaaataacaaaaaaaggaagccttccgcttccttctcccctttactccggctgtcagactcgaactgacgacatcttgattaacagtcaagcgctctaccaactgagctaagccggaatattaaaaaagagcacggcagcttcctttcctcgcaggcagttgcccaccaactactttcggcgttaagaagcttaacttctgtgttcggcatgggaacaggtgtatccttcttgctttcgccaccgtactcttttgagcttttacactcaaaactaaacataatccttctcgcaaaaaaccttccagtttgcttcgctttggtcaagtcctcgactgattagtactggtccgctccatccttcacaggacttccactcccagcctatctacctcatcgtctctgaggtgtcttactgcttacgcaaaggaaatctcatcttgaggggggcttcgcacttagatgctttcagcgcttatcccttccgcacatagctacccagcgatgctcctggcggaacaactggtacaccagcggtgcgtccatcccggtcctctcgtactaaggacagctcctctcaaatttcctacgcccacgacggatagggaccgaactgtctcacgacgttctgaacccagctcgcgtgccgctttaatgggcgaacagcccaacccttgggaccgacttcagccccaggatgcgacgagccgacatcgaggtgccaaacctccccgtcgatgtgaactcttgggggagataagcctgttatccccagggtagcttttatccgttgagtgatggcccttccatacggtaccaccagatcactaagtcctagtttcctacctgctcgagttgtctctctcgcagtcaagctcccttatacctttacactctgcgaatgatttccaaccattctgagggaacctttgagcgcctccgttacactttaggaggcgaccgccccagtcaaactgcccacctgacactgtccctggcctggcttacaggtcgaggttagagcatccttcaaacaagggtagtatcccaacattgcctccaataagactagcgtcctatcttctctggctcctacctatcctgtacatgtttaaaagatactcaatatcaagctacagtgaagctccatggggtctttccgtcctgtcgcgggtaacccgcatcttcacgggtattataatttcaccgagtctctcgttgagacagtgcccaaatcattacacctttcgtgcaggtcggaacttacccgacaaggaatttcgctaccttaggaccgttatagttacggccgccgtttactggggcttcaattcaaaccttcgcttacgctaagctctcctcttaaccttccagcaccgggcaggtgtcagcctctatacgtcatcttacgattttgcagagacctgtgtttttgataaacagttgtttgggcctattcactgcggctaaccaatctcttggctagcaccccttcttccgaagttacggggtcattttgccgagttccttaacgagagttctctcgctcaccttagtgttctccactcgactacctgtgtcggtttgcggtacgggtatgtcatctctggctagaagcttttcttggcagtgtgattaccacaccttcgctacttttaattcactcctcttcacaactcgtgttgctggttagaagcatttgactcttaaccgcacttgttgcttgaacatcgttccatcgcgatgcgtgcttcacctcctgcgtccctccttcgctcttaacgatttgacacagtacaggaatctctacctgttatccatcgactacgcctctcggccttgccttaggtcccgacttaccctgggcggacgagcctgccccaggaaaccttagtctttcggcggataggattctcacctatctttcgctactcataccggcattctcacttctaagcgctccattgatcctctcgattcaacttctccgctcttagaacgctctcctaccacgtgctctttaaaacacatccacagtttcggtactatgcttagccccggtaaattttcggcgcagcgccactcgactagtgagctattacgcactctttgaatgatggctgcttctgagccaacgtcctagttgtctacgcaactccacatccttttccacttagcatagatttggggaccttaactggtgatctgggctgtttccctttcgactacggatcttatcactcgcagtctgactcccgtgtatggatatctggaattcgtagtttatctggattcagtaacccctgacgggcccctagtccaaacagagctctacctccattatcctctccacgaggctagccctaaagctatttcggagagaaccagctatctccaagttcgtttggaatttcaccgctacccacaactcatccccgcaatttttaacttacgtgggttcggccctccagtgcgttttaccacaccttcagcctggtcatgggtaggtcacttggtttcgggtctacgtcacctaacttttcgccctattaagactcgctttcgctccggctccgtcttttctgacttaacctcgctagataacgtaactcgccggttcattctacaaaaggcacgccattgcactttaatgtgctttgactacttgtagacacacggtttcaggttctttttcactccccttccggggttcttttcacctttccctcacggtactggttcactatcggtcactaactagtatttagccttgcgagatggtcctcgcggtttcaaccgggattcctcgtgtcccggcctactcaggattctgctaggcgtgcttgagatttcgcttacggggctctcaccctctctggcttaccttcccagataattcaactatctcttacactgccacgtcgcagtcctacaaccccaaatgataaatcacttggtttgggctctttcctcttcgctcgccgctactaaggaaatcgatctttctttctcttcctgcagctacttagatgtttcagttcactgcgtcttcctttgattagctatctattcactaatcaataatgcatctctgcattgggttcccccattcggatatctccggatcactgcgtacttaccgctccccgaagcttttcgtagttcgtcacgtccttcttcggctgttagtgcctaggcattcaccgtgcgcccttttctacttgaccttactcaagaattctcttctcggtcgctctacaatctgttctctttgattgtctcggttttttgcttggattatattcagttttcaatgtactagctctttttgaggtactaccctcaaaactaaacaaagtttctcagtgtgcttccgcttgctctggatacttctcttagcattcctgctctccatatccttcgcttccttagaaaggaggtgatccagccgcaggttctcctacggctaccttgttacgacttcaccccagtcatctgccctgccttagacggctccttcccgaaggttaggccaccggctttgggcattgcagactcccatggtgtgacgggcggtgtgtacaaggcccgggaacgtattcaccgcggcgtgctgatccgcgattactagcgattccagcttcgtgcagtcgagttgcagactgcagtccgaactgagaacagctttcagagattcgcttgccttcgcaggctcgcttctcgttgtactgcccattgtagcacgtgtgtagcccaggtcataaggggcatgatgacttgacgtcatccccaccttcctccggtttgtcaccggcagtctcattagagtgcccaacttaatgctggcaactaataacaagggttgcgctcgttgcgggacttaacccaacatctcacgacacgagctgacgacagccatgcaccacctgtcttagcgtccccgaagggaactttgtatctctacaaatggcactagatgtcaagacctggtaaggttcttcgcgttgcttcgaattaaaccacatgctccaccgcttgtgcgggcccccgtcaattcctttgagtttcaaccttgcggtcgtactccccaggcggagtgcttaatgcgttagctgcagcactgagaggcggaaacctcccaacacttagcactcatcgtttacggcatggactaccagggtatctaatcctgttcgctacccatgctttcgagcctcagcgtcagttgcagaccagagagccgccttcgccactggtgttcttccatatatctacgcattccaccgctacacatggagttccactctcctcttctgcactcaagaaaaacagtttccgatgcagttcctcggttaagccgagggctttcacatcagacttattcttccgcctgcgctcgctttacgcccaataaatccggacaacgcttgccacctacgtattaccgcggctgctggcacgtagttagccgtgactttctggttgattaccgtcaaataaaggccagttactacctctatccttcttcaccaacaacagagctttacgatccgaaaaccttcttcactcacgcggcgttgctccatcagacttgcgtccattgtggaagattccctactgctgcctcccgtaggagtttgggccgtgtctcagtcccaatgtggccgatcagtctctcaactcggctatgcatcatcgccttggtaagcctttaccttaccaactagctaatgcaccgcggggccatcccatagcgacagcttacgccgccttttaaaagctgatcatgcgatctgctttcttatccggtattagcacctgtttccaagtggtatcccagactatggggcaggttccccacgtgttactcacccatccgccgctcgctttcctaacgtcattaccgaagtaaatctgttagttccgctcgctcgacttgcatgtattaggcacgccgccagcgttcgtcctgagccaggatcaaactctcattttaaaaagtttgaatgattgctcattccttatttaagatctttgtctcaaatttattgcttgcgaattgacttcgcttcttgtttgggtttttacacccgcacgcttttagcgaaactttgttcagttttcaaagtactacctctgtcttgctttttttgcaaagcagacggcttttatattttatcaaaccatcatttctttgtcaagaacttttttgatttgttttttttcgtcttgctcaagctttttctgctttcacctgacgacatttaaatatattaccagcttatttacttctttgcaagtactttttttctttttatttgttttctttccttacatgtctgtttttaagctctcgtcgcatctctcgaagcgactttattaatttaccttattttctccgctttggcaagtcttgctcttcgttcgcaatcttttagaaacgcttggacgcgttggaattatttctttatttctatttcaatctacctttttctttttgcttactttatttttatccttacgcttattattcgagttttactgttttttctcttaattttagtacaaaatttttcgaatttttttcaaaataattcaaaaaaacggtgttttgcctaatttttcactcaaaaatgcaaaaaaaagacgtttatcaaatataatcattcgataaacatctcattttatatctttagatgatcaatctttagtgtctattcatcttttttcttacgtttttcaacgccaagtaaactaatccaacctaaatcagcgagtaatgtaccaatcaaacctagtgtgtgtttgtgttcactaccagtttgaggcaataagtcttgcacggacttcggttttgcatttaatttgttagctaattgctttctttctgctttccctattgtcctcttgccagattcagcgtctgctgccttaactgggccgttagcgcgtttctttcgacctgtaggcataaccttcatgcttaggattgttattagagtcatagcccttcttatttgctttagaatgattatgcttcttttcactttccttattaggctttgccggtttatctggcttagcaagcttgtttggcttatccggtttatttggtttgtcaggtttatctggtttcggctctggatttggttttggcttcggttgaggtctggttccggagtaggtacttcatcttgcttgtaagtaattttaatattactgtcagccgtatctactgaaaccttttccgctgccaccttactttgtgaagcagtgtagccactaaatgttggagcagtatatgcatcccactgagtattaccatctaccttccactcactgtatgtaactttgccagtaactttatcaaacgttactttttgagtgataatcagcttagcaccaaaaggcgtaatgactgtaattattctagttggagtcttagtcaaagtatcgaagtgatcatagttcttacttgaatcacctggcactggacctgttggaacatcccttggtggagtttctggagtaacaataatggtgtcgtgttcaacccttacagttatagttggaatgccatcagcagttgcaactactgtcttaggaatatcctgtcctgaaacaatcttccatcctgctggaacttgttgatttacatctactgtttcaccggtcttgccactaagcggagtttgccctacttctttgccatcactatcaacgtaagaaatcttccccgtttgagtgttgacagtataagtaacagtgacttcactatccttatcattgccagttactttcacttgttcaaccttgttaggatttgtggtatagccagcaaattccttcggcgtaaatccagcaaatgtatccttaccatctaccgcagtccattggccttcactattggcaaccagctttacagtaaccaaatcatatacggcagtccgcgtaaattcaacggtctgtttcttttgatcttctgaaatctgagctagttgttcttcactcaaaccttcgtaattaatggttcgggtgacatccttaactaggtcatttttcttgaaccagctttcatccttagtaggattggttgctgaatcagttggatcaacgattgctgtcttgtgaactaatttaatgtacaagttctgacttaatgccttgccaaaagtatagctagttggcaattcttgatctggtgctaactcgtagttctctggaagcttcaaatcaaggttatcaacagttgagccagcaacgccagattcagctggaattccatttgcaaattcataagtcaaacctgccggaactgtaatagcagttggaacattaactttaaagtttgttccatcaattactggtacagtgctttcttgactatagttaggattatcatcttgcaattttttcaatcccttagcagttaaggcaatgtagtaagtaccggcatttgttggcgcagaaattggcttaccattggcatcgacccattcataatcaccagctgctaggttagcagtattcaacgtttcaccgcttactaaaccaattggagtgaatacaccgaagttggtagcttgagtgttaatcgttgcaggttgaccatcgtacgtcttgccatctgcgcccttactattaccgtcaagaactacattaagatccttttgtttaattgtgtaagtggcagagcctagcaggtcttcagcatccaaggtgacatttccttgaccagcgtattggttaagggctttttgcaagttaacaataccattggcactcagcttaatcgtgtaagtaccatcattaactggtgcgctgccagcattccaaatataatcaccgtcttgcagagcatacgtactttcggtagttgaacctgggaaagtaaagtgaactaaaatttgaccattgctgttaacttgtgcagttgttacagctgtaccatcaaatgtcttttggttagagccattaagttttgcgtcagcagtggctgcagtaactatgtagttagctgttgtcttaaatgtccacttgtagttagcaccattattaccagttagttgcttaagcttttcttgaccagcctgtgacaatttaacttggtaagtaccgacattcgttgcattaccaacaatttgcaaatcgtcagcagttaacttaagtgtctgagcttcaccatcagcggagtaaaccgtcgcatcgtaggttacgttgtacttattcaagttaagtccacttggtaaggtttgcttagcatcataagtcttgctgtcaccactattcagggtaacagtagcttcgccctggttaatgtacccttagtagttacatcagctgctacttgtgggtatgcgtagttagtacccaaagctttttcaatgttagccaacccttgcgcagataattccacgtggtattcaccgacattgcctggggtttgatcaaagatcaagtcaccatctttagcagtgtagcttaaattagtactattagtactatttttaccatacgtatatttacaacaacataatctttgcctggatcaggaacattaacttgccaagtttgtccagcttctttaggtagactccatgaaccagaaatcactttaaatcctggcgttgttgaatcacctgctgtttgatcccattgccaattaccataagtaatcgtgttattagcaacatttaaactaccagtctgggcatagaatacctgtatttgtgaatcaggtgcaaattgttgaccatttttgtcaccaccagcaattacatatttagccgttactgttctcgcttgctgttttactggaatatacaaaacagtgtgaactggacgggcttcataaactgaggcgttctcagtatatgctagagactccttaccctcactagatgtatcttccttattccaagttgggtaaacaaattggtttgctgacctggatcgccgctcttattgtaagcactataagaaacttccttattattttgagtagaaacatctttagtatcttctagactagtagcttttttatcttctgcctgtttagttgaattctgctcggttgaatttttgctagtcaaaggatcggtaccgctaacttctttttgagcagtagtatcgttatcattcttaccagctgtcgtagtctgatcatttccagtatctgtggtagtcttcttagccgactcaacctcttctgtttctactggatccgtagtatccgcatgaaccgtttgacttgtattcatcgtccaaagcaaagttgaaagcaaaacggaacaaactccaatgttcaattttctaatactaaagcgctgcttgccttcaaagtcatttttatttagtctttctattacgcggttttattctattcatctattttaacgcctaacataaatcacaacaaaaagcaggcttaaattatatgcaaaaaaatcgttattttaagttgtcagtcacaacaactaaaataacgattttgcttttttaatctttaattacttaaattaaacctgattccttagtaatcttcttcataccattcatgtaaggaacaagtacatcaggaacagttactgaaccatcttcgttttggtaattttccaaaatagcagctacacaacgaccaacagccaaacctgagccatttaaagtgtgtgccaagtgaagcttgccgtcttcatcacggtaacgaatttgtgcacggcgagcttggaagtcagtacagtttgaacaacttgagatttcacggtacttgtcttgtgcaggcatccaaacttcaaggtcgtaagtcttagcactagtaaaacttgcatccccagttgaaagagcaactacgtgatatggcaagcccaacttttgcaataagtgttccgcattatgagttaacttctcgagttcatcccatgattcgtcaggcttacataccttaaccatctcaaccttacggaattcgtgcattctgatcaaaccacgagtgtcccgtcctgctgaacctgcttcacttctaaatgctggtgacaatgcagtaacattgattggcaacttgttttcatgaataatttcatttctgaagtagtttaccaatggaacttcagcagttgggatcaaagttaagtcacgtggcttatctggatcgtcattatcaacgatggtataaacatcttcgtggaacttagggaattgaccagttccttgcattgatgcatcgtttaccaagtatggtgggataatttcggtataaccttccttagtgttttcatcaaggaagaagttgaagacagcacgttccaaaagcgcaccagcaccgatgtagtaaacaaaacgtgcacctgaaacctttgaagcacggtcccagtctaagatgccaaggtcagtaccaatatcccagtgagcctttggcttaaagttaaattcagtagttgggtgccacttacgaacttcttcgttgtagctatcgtccggaccaattgggtctgaatcagctgggaagttaggcaatctaagcaagatgtagttttgcttttcagttaattccgcaacttccttatctaagtctttgatttccttacctacttcacgcatagcagcaattgcatcgctagcatcttctttgttacgctttttttctgcaatttgcttagaaacatcgttacgcttagcctttaattgttcactcttagtcaaatccttacgacgcttagtgtcgatttcaactaattcatccaattcttctggcttaatgccacgcgtagccaatttcttctttgaccagtcaagattctcacgaatcaccttaatatcaagcatataaaacctccatgatatgcataaaaaaaagagccgacttatccctacacttgggacgaatcggctcttacacggcttcgcggtaccacccagcttcagtctatctagactgcacctctttaccagacgagtaacgacgtcaaaccgtgcaactattaattgcccacattattgaaatctggaagcgactatgcattcactcgcaccaaccgtgaactctctgaagcagtcttaggatttcgtgtttgcatttattttaagccattcttcttttttgagcaaataatatttttctttaaacgaaaaaagtgcactaacttgtgtgtaatcgacagtataaacatactgaaatcctagtgttttaagcaatttctgtgatttttcattatcggcaaaagttccagcccagacttctacttgctttttctttttaaaagcataggtcaaaatcaatcgtaaagcttcagtcatatagccgtgaccttcaaacgactgatctagcaaaaagccaacttctttagtctttaataggccactcttttcatctaagccgcgttcatacaattcaaccagaccgatcacttcattgttcttgcgcaagcaaacgacataactttcaggacgcgacatatattgcttcacgccattaaccgcctcagtcagattgcggtattcctcaaagccagccatcttgtggtagcggggattgccaccccacttcagtaattgctgcgcgtccctttcttcaaaaggtctcaaatatattctcttagattcaagcattagttacccatcagcttcaagagccactttgcaccaaactgtaggcctatactataggccgcaattgtccatggcttacacaaaataataatccaaaaataagtccaaaacttcattttagtcaatcctgctagcaggcaaagcacgtcatcgggagctgctggggcgagaatacataatgcaaagaaccaattaaatttattctgattctctgtccacttcatatatttatcaagcgtttcttccgaaacaatatgcaaaataaagggccggccgtagtgtctagctaaaaagaagttgataattgagccaatacaaatccccacgtagttataaataaacccagcaactgggccaaagaagaccacgcctcctaataaagacacgcccccaggaataatcggaataactacctgaacaatttgaatcaacacgaaaataatcggaccaacaatttgtttattagccagataagcccgcattttagcttgatcggtaaagatccccaagcggtaccaataaatcaccagcaacacgattgcgactccacaaactatagttgcaatattgattaatttacgactagccttagtcgatagatgcattttctcgccttccttcatcgcctagtagttcaattttaacaaaaatccagcccagataccgtaaacatgcaaatctaaaaaaagttttattattttagctactttgggcagatactatataataaagttaataagttattagaaaggtaggcatcttatggttgtaattaagaatgatattgtttatgacaagactaaagaattaaaaacggatatttactatcctaatgatacatcttctaataccaagattttaatcttctggcatggcggtggctggtttagaggtgataaagacagcgtcaaaaatctaggtattcgctttgctaatgcgggctttatgaccttcatccccgactactccttagcacctaaataccactttcctgctgctcatgaagatgcattgcactttgtcgactggctgttgaattctgaatacactgatcaagacgatatcaaaaacattgttcaaattggagccagcgttggcggtgaaatggcaattgaggttgctgggaaatacggtttccctactgtcacctggtccgctccagttgaatattcaaactggattaaagatcatcaagatactaaagcatccccagatgccgctaacgattttggcattaccgatcctgaaaagatcagacaatctttctacaagtacttcacattaacctacacaggtactgaagatgaggctgtattacagaaattagacgctaagtcatttgactatggccatctcaagcaattaatgatgattaattccgcagatgagttgacaccactagctacagtattggattttgttaagttcttagctgacaaaaacttaggcgtacagctcctcgtaattcctggtcacggtcacgccatggcctatggtcccgattatgtagacgaatcgctcgattttttatatcaaactattaagagacaaaattaagtatgattaacatccaaaaatttgttcaagtcagaaagaaactaaagttatcacaaactgagctttgccaatgtatttgtacccagtcgaccttaagtaagtttgaaaacaacggacaggtaccttcatttaaaattcttaagcagctttgtgaacggatggatattgatgttagcgatattatggacaacagtgagcacaaatatatcgcgcatatcctgtttgaagcggattttgcttttatcaattttgattacagtaaaatttttactttactttcacaaatcaaccccgaagtagacctaaaacgccaaacaaatcggattcattatcactatttgcgcggacaatatgctctaagaagtgatcgcaatcaaatgagtgcgctcttttatttcaacaatatcttgaccacccaggaattgcctgaaaatgatatttaccgcttgttggcattaaatggttgtagtcaaatctatgctaaacaaggtgaaacagagaaagccgagcactattatagtcaagtattaaagaacattatggacgtcaagatcgataatattttgactacaatgcatgccttaagtattttatgtgatgccggtgaattctatggcgaacgaaaaatgtatcgtgagtctaatgcattattgcgctatgcctataagattggcgctgagaagcacgtgattttttacatggcacgcatcctattgcggcaaggcatgaatgatattgatcagtcaaaaaagaaagcaattgctatccaacatttgcacgatgcctgtgcttttgcccgaatcaaccgcaacacgattacgctaaatcaggctaaaaaattactaaaaaaattaaatgactaagatccaatttgaaatatagtaataagagtttgttcatttgattttgcaaaaatgataaaattagtataaatgaacgctgtttaggagtttcagataggttgactttggaacgaattatcaagtttatgtttgacagtattggtagctatttatccattcgaaaaattgccaatacgttaacttcaatgggacataaaatcacaccaaatacggtagaacggtatattaatgcgttactcgacagtttgattatctatgacgtttcacgattcgatattcatggaaaagagcagctaggttcgctaaaaaaaatattacattgttgatactgggcttagatatcatttgttggcaaatcaaaaaaagatcgtggacatataattgaaaatattgtttatcttgagttgcttcgtcgtggatataacgttactgtaggtagcatccctaatggtgaaattgattttgtcgcaagaaagaataacgaaattttttattatcaagtgtccgaaacagtgctagatgaaaagaccttagagcgcgaattgaaaccgtttaacaagattaatgatcattatccaaaatttctattaacaatgaatgaatttggcaaaaatgataattttaacggaataaagcaacttaatattttagattggttattagaataattaagctaagattaagaataataatttaaaaaaagaattcgaaaaatccccatttgtagtgaaaatgcctacaaaatggggatttttttagataatcttgtaaccagtaactggcttagcaggtactgtattgaaatcaaagctagcaagtttgtccagttcagtattaccatcaataattgtagtaacaccttgagcaatcatcaggttcattactttatccttgtctagatccttagtgaaggttaccaagactacaggcttatgcaaagcacgcatgaaaccaatttcaaaagcactaccatcatctacattgtccatgtcatacaagaagacgccacatgtagagttaactagaccttccaggtcattgttataagtggcaaggcgccaagtcatgctgcgaatgccaccaatttcaggattcttttcatccggatcaacaaaattttgatcaaatggaaaatgcactctgaccactgtcggattttcttctaacaaggcacgagccttatcaactcgagcacgttgatcatcattgtaaaatggagtgcctaaataaaccttagcagttgaaacttgtttgttcatgcttttgtcccttcaatgtttaaaacttacaaaataaaattatttttcattttagcatgacttttttacaactaaaagcacaaatagctgtgttttcattgtaaacgctttataatagaaacataacttattaaagctaaacataaaacttattggaggaattattttgtctagatatcaatcaattaatccatatactaacgaagaatttgcaagctatgacaattctactgccgcacaaattgacgatgccattaacttagcacacgctttatataaaaaatggcgtcatgaaaatcctgagacccgcagtcgtcaattacacaagatagcagatgctttgcgcgagcatgaagatgacttagccaaaatgatgaccctggaaatgggaaagcttttgcgcgaatcaagagaagaagttgaattatgtgcttcaatttgtgattactatgccaaaaacggggtcaaaatgttggctcctactccaatcgaatcagacttaggcaatgcctattatttgaagcaatcaactggcgttattatggcttgtgaaccatggaatttcccactttatcaagttattcgggtcttcgctcctaactttatcgtgggcaacccaatcttactgaaacacgcccacaatgttccaggttctgctgctttaaccgctaaaatcatcagacgtgctggtgctcctgaaggcagcttaattaacctttatccaacctatgatcaattaagcgatattattgccgatcctagagttcaaggcgttgcattaactggttcagaacgtggcggttcagctgttgccgaagctgctggtaaaaatttaaagaaatcaaccatggagcttggcggcaatgacgcatttatcgttttagatgatgcagatccgcaagtattgcgtaacgttttaggcgatgctagaacttataacgatggccaggtatgtacttcatccaagagaattattgttgaaaaatctcattatgaggaagtgctacatacgcttaaaaacgtcttttctaatcttcaagcgggtgacccacttgaagccggtactaccttgccaccaatgaattccgaacgtgccaaggaaaaattagaagctcaggttaaaaaggccgttgacgcaggagccgagattttttaccaatatccagagattgattctaaaggtgccttcttcagacctgtaattttgactaacatcgacaaagaaaatcctatttatgatgaagaattatttggccctgtagcagaagtctttgtagttgacgatgatgacgatgccattcagcttgcaaatgattctagctatggcttaggttcatctgttatctctaacgatatcaaacgtgctcaaaacgtggccgctcaaattgaaactggtatgactgtcatcaatggccgctggattacctctggtgaattgccatttggtggcgtgaagaagtctggctacggtcgtgaattaagtgacttaggcatgatggcctttgttaacgaacacttagtaattgatgttactaagaataatcaatagtaatttttcgataaaagaaacatactaacctagtgttggatcatgaatcgacggattcacgatctggcactttttattttgtctaaaatagaaagtgaagataaagcaaatcaagtcttcagctttttagacacttgatgtcgtaaaagaaacggactgctttaccacctattcttaagtctcttcgaagtctgtgggcacttagatgccgtgtttagaaaattagaattaataggttgataaagaggtttatcttcacagcggaggttatattatggaatcacaaattattttcggtattgatgttagcagtaaatcttccacagtttgtgtggttaatgaccggatcaaacaaggcgaatcttttagaatctctaatgattcctttggctatcaaaaactttatgagcaactgaaccaatatttgataactcctttagttgttttcgaagctactggtgtttattctctaagcctgcaagctttcttagaggattatcatattaagtatttgaagcttaatccgcttaaagcgaaaaagctaatggacaataatttacgccataataaaactgataaggtagatgcttatcgcctggctttaattcaatttaatgccccgcaaaagttgcgtgatccacagcccagagagtatcatgaacttcagaatgccagtcgctattatgaagaacttactaggagtatagttactactaaaaatcaattgcaccgcaacctccaatccactttcccacaaattgaagaaatactgtctcatccatctggcagaatttattgggcgcttgttagtcttttccaacatgctggatatgttctagaaaagaatgagacacaggtaactcaaatgcttaattctatttctggaataggacaacaaagggcacggtacttaaccacaagattatacgcttttgctagagaagcttatccttatgattccaaagatagtattatcgttagagctattcaaaggaacatttctaatttgttttcactccagcaagaacgcgactatgtaattaactacatggaaaagctggctaaagcagtaaacgctcgtgctttatccatctatttgagtatcccaggggttgctagaattacagcagtgagattagtagcagagctcggtgatctaagacggtttagcacttcagctcaaattgatgcgtttgttggcattgatccaggaaggtaccaatctggtgaaaaagacagttctcttggcattaccaagcatggcaatcatattgccagaaaaatactttatcgagttattattcaaatggagacggtaaaggctacgcagccttgccatataactgattattatgacaagaaaaaacgatcttcaaatagccaaggctataagaaaatcgccattgcatcagtccataaactgatacgcacaatgtttgctcttatcaaacatgatcaattatatgattacaacatagccaccaaaaataaaagactttagctgaaatcaaataatcaacttaagtataagcaacctatggaaaaactacaagtattcataggcttatttgtggtactttcgctttttcttaaatttaaactcttatttgctttaaccttattcgcatcattaaaacaagtaaatttattttcttaaatcattgataatacttgactttgggtagaaaatacgctggcaacttaaccagcgtatttcttttacttattattaattctatttctttttaaaaagattatatccagccaaaatcgtggtcaacacgctagccaaaatcataaagtaagctgaagctccgagagaaactgcatatgacataagttgactcgtcaattgagccagcaccccagttgaagcatgtgccgcgcttgatatttgaaaaatcatataaatcaaaaagattgattcaatcaaagaaaggaagaaggccaaagtctgactagccttagtatttttcaaaatattataaataatgaaaattgggaacaagaatagtagcaaccagacaatgtaaagaataagtgcataccatgatgtcacgccagatgaaagcaagcgccctgctaaaccgaacagtacattggaaatagacattctctgcgtgtaagccgaggcacccgagtcggtaaagagaacgattagactaactaaagccgtaaaaataactgaaatctgcacataattaaagtgatgtttgcgaacattttttatttcacgtacatgattttcaatccgaggatatttttgcacaaattctcggtttttcgctttgactttactttcacgtgcatccacccggttaaagacatcggaaccaattcggtcaatcttttgcgttaatcgcttatcaaccgtatactgctcgatcttatctttacgatcacacacaatataaagccaaaccattagggctaaaaagccagtccaccctgccgctctagaaaaactcattaggattaaaagtaagactcccaataagaagactaaggtcgcatttttcctaacccacgcaatcattctttggacagtggtgttttgcttttcaggaataaattcttcccgataggctgcacggctgataatcttttcgccttcatctggttcttcaaactttgctttttggtgctgatctgtgaaaaagtcgtctcgatatttttttagattgaagccacagtttggacaaatatcatctgtttcactaattttatggccacaatttggacaagtagtcatataaaaattcccttctttttcaatctgttagtcattattataacatgtatcagaatttgaagatcaaaacaaaaaaagaccgaatcattgcgattcggtcgaaaaaattatttactaactatttttcaacattaattggtaaaacattatcaatataaggtgaatgtccatcagcaatcaaatctgatatctttctcaacattggaaattgtatgttcctagtatcatttccaaacttttgatatgcttctggagttgcatctttatgtaataattcatatcctaatcttttgtagaaattaacactttcgtccacagattcaagataaatcagctgaacacctgtatacaatgcaatcaccatgcacatggaaaagaattccatcattagtgctctaccaattcctgttccttggtattccttgtcaattgcaaaataagcaaggtttatatatggtgtatcaactttataagtaccatcatccttcttaacattctgtgttaataaccctactgttgacgagaaaaaaccaactatctgatttttgataggatccattaatacaaaagtctttaatttctgtgtactttcgaacttcggacattccttacgaaaaaaattatctataccacgattagtggaatcaaaatgtagggctaactcttcaaaatgtggacacgtacttaacgggcataatttaaatgctctactttgattcatgcttttccttcccacgttgaattactatcccatcagcttcaacttctttttgcaacttttttatagacacacgtggtactggattggctattttgtttttgaattctttaaatgctttttcatttttaaatgttatctcagcatttctaacaatacctaccataattaccaactccttttagtgtacctattaatattatacaatcataatctgttttactattagtttcaagatttattttaacaaaaaaagaccgaatcattgcgattcggtcgaaaaactatttattaattatttttcttatttcttcttttggcgaacttattaaggtcaattccctcatatgtcaacttagtagctgctgacatagtaattggcaaaatgaagaccaagatgagcaaaccaatatccacggctaaggcaacttcaatcaaagttggaatacctgatggaatcaaggctgcaaaagtaccacccaagataattgcggctgatataacaaccgtaccaatgatagcacatgccttcaagattcttgaacttggagtagtgtatccttcagactcaagttcacgataacgagtcatcaggaagatactgtagtcaacacccaaagcgatcaacataatgaagctgaagaatggtgtgttccaagtaagcattgacttaccaagaactgctttaacaatccattgattgattgaaagtgagcagagataagcaataagtaaagtaccaagaatgtagactggttgcaataatgaacgagttacgaacatcaaggcaatgccgataccgattaacatgatggcagcagttctaaggaagtcgccactggcaactgtcttagtatcttcaatcttggaactttgaccacccatagctaccttagcattcttcaaagcagtaccttggaatgacttcttagccatagcacttaattcttgtgacttcttagtagcttcggttgcacttgggtttgaatcaaagacaacaataatttgagctgacttcttgtctgggctgaggtaaacatccattgacttcttgaacatatcgttcttcaagaattccttagggatgtagaaagtatcagcggcagctgatgaacctaaacctctgaggtaggtttcaccttgacctaaaccactattaacagtgtcaatacctgaagtcaattgtggaactttgcttgccaacttaccagcgccagcactgagttgtccagcacctgtgttaagttgactgatacctgaaataagttgtggagcttgaccagctaattggccgataccactgttaagctgaccggcaccatttgcaagtgtgccaagacctgtgttcaattgacccgcgccattgttaagtcggtttacacccgcaccaagacgactagcgcctgacgaaagtgaacctaagccactgcttaattgaccagcacctgaattaagtctttgtgcgcctgccacaccttgtgaagcagctgattgaacttgcgtcaagcctgagcttaattggttcaaagcagtagctgcacctggaagtgccttgttagaagcttgagctaatttagctacttgagtctggagagttgataattgttgaagtgatgaagttaaagcacctaattgtgagctaagtccagaaacatctatagcagcattacccgtttgagtatcagcttgtgtattactaaatgccttattaatagctgcttcagccttttgctggtcttcagtagttaagccagcactgccaatggcttgaagtgctgctcgttttgcttgtgcctgagcaccagcagctttttgactagctgctgacaattgtgctgcttgttcttgtaacttcttcaaacttgcagttaatcgtccaacttgtgaagtatctaatccactaacagcttgattcaattgttgaataccactgttaatttgtggcaaagcagtttgaagttgagcgagttgttgtttgtttgaaccactcaattgagttgaaagttgtgaactcaattgttgtaattggttaaccatttgttgggtaccactttgcaagctgctagcaccattctttaagcgatttgcaccgctaactaattggcttgcaccactttgaagtgcgtgagtaccacttgccaaacgaccagcacctgtttgtaaacgtactgcaccactttgtaattggcttgcaccattttgcaaacgactagtaccaccaactaattgttgggcaccactttgaagacgacccgtaccatcttgaagttgatctgcaccatccttcaaactattggcaccattagcaaccttgttggcacccttactcaatttgcccaaacctgaacgagcttgatcaacaccgtcgttaaccgtgtttaattgattgttgacataaagcatatcaattggttcgccgtaaggttctgtaacagatgtcgcaaatgaaacatcttttgaagcttgaagttgcttagtcacttgatcaattaacttcaaattttcttcattgtctaatctatgcttgctttgaatgtacaagtatgatggttcagccatccctttagagaagtgcttttgtactatcaacaaaccttgcttagatggaactgaatctgcaatttcatcagtgtcatcgtagttcaagtgacctgagtacattaacatgaatggcacaacaacaactgctaacacaaccaagtaaataattggatgcttcaatgtggcagatgaaataccatgccataacttgtcatcactttcaccagtaaatttcttaactggccagaacattttcttaccaagcgtagccataaagaatgggttgagtgttaaaagcactaccaataaaacagcaacgccgaccgcaacaccaacagctgattggtaaacggagaatttagctaaacttaaagcagtaaaaccaattaagatggatgaacctgagtaaagaattgttttaccagcattgcgcaaagcgtcatgcatggccttatacttgtccatcccttttcctagattttctttaaacttgtcatacagcaaaatgttgtagtcggtaccgataccgaagagcacgataaccataaacacttgcgtaaagcttgaaaatgggaaattggcgcttttaactaaattagtaacaattgagaaggaagtaaggaatgaaacaccaactgtcaacaatgaaataagtggaacaattggtgacttaaatacgataaccaaaacaataaagataaagacaactgtaatggcttcagtcttcttaattccctcttgaattgaagcggagaaggcgtgctgcaagacatccgcacccgttacataagtacgaagcccttgcgttttcgcggccttgttcatttcgttataaactttttcaatcgtaccatgactcttagccacattaaattgtgctacccaagtcgtgccatcttttgattgaagtttctttcttgtagcaatattggaatctggaagtaatgaatccttgattccgtacttgcttttatcattagtgaacttatcaagcgtattattaatagcctgtttatcggcatcagttagcttgccactctttttgttaaaaacaagtgctactgcataagtgtttttctttttcgagccccaattgttctctattgactgtgccacattgctttgcacattacttggcaacgtaatgttagagtgatcattagtcagctgcgtaatgttaggcaaagcaacaacggaaataatcaatattaaaatccacgcaatcagttcgaaaacatggttcttcagaaatttctgcactttcctatttcctccctatttgttgtaaatcaggtactggttctacaagtcgtaaaatcatttcatgataattacgattagattcatcttctgtttcatctccaaaagacttcgatttatccaaaaaaacgtaccctaatacggcgccaattaaagcatgaaatgaaatgacactttcttttttaaaattaagtctttcacccattttaattaaatccaagatttcttgattgatggccgcatcctttggatattcgttcaaatgatacagaatacttgataaagccggatcgcttaataaaaagtcgcgcacaacatccgcaaacttaagcaatgcatccctacctgacataccgattagatcgttcatcaactcatgacgtaagatcttaatctgtcttgcaccaactagtgatagcaattgtttgcgtcctgaaacgtaatgataaagcgactgtgagcggacatcgagcgccttagccaatgctggcaaagttgtagctgtcagtccttttttagaaattaattcagtagcttgatcaattattttatccagatcaagatttcttttctgtgccattttcatccctcctttgtcttagcatagtaaataatatacacctacagtgtgaagattacaatctacatagtgtaaataatttattttttctataaaaaaataatgaagccttctcggacttcatcatttccgttacttatgcttttttataaaccaagcattaaccgttttgcccaatttattaaaattcttgtgttgcgtgctccaaacagacatacagtaagcacgtccgttagtctgaacaattgcgacagcaaaatcatcatcaccaattgcataaatgccgccacttaagccagaaactaaacttggtcgctctttagctagggttgctaaaactcggctagcatattgccgatttaatacccgaccttgatacaagccaatcattgttttagctaaatcattagctgttgtctggccagtcatatttgagttgaccttagtttgagtggcacccatttttttagcaacttggtcaatattattaactccaatttttctagttaaggcactagctgcagttttgttacctttaagcattgcgctacgcaaataacttacaccataggtaataccaacttgaaacatcttatcacccttggctttgtcttttttgctaatcttaatcgcagttcgcgaccccatcttgcctttttgttcttgctcatacaaggcgatcagtaaaaataaccgcattgtttttcctgcgtcatgagccttattagtattaaaaactacggcaaagtgactagagttagttaaatcctgtgctactacctggaagctatcatcaatgcccataacttttttgatttgcttgactagcttctgattactgcctttttgagctttaacatggttagaatattcaatcgaattaaccttgggctccttaggcttttctaattttttaacctttggctccttggtcttctttttattcttagcgaccttgctgttatttggttcaacaatctttaactgcgcgttttccacccgctttatgtttgatgtatacaaaatgaatgcaaataaagtcacaattaaagaaccaattaatattttatgtttcattaaaacgcctcaattttagaagaaatgatgccttttcatcaaaatgactaaccaaaccattaaaacaaccatcaaaataatgattaaaacccagtcaaatgaattttttaaaattggtagactaacattcatcccataaaaaccggttaaaatagttggaatagttaataccaatgaccacacagttaagaattgcatggtatcattcaaattattgttcatcatattattactggtagctgataaagtcttagttacctgctgggaaatctgcaccatttctgcagactggcttgattcaatcaagacgtcatccaagcgttcactggcttctttagtgaagtctaatttgctgtgattcaggccatgcaacatgattaaatccgtctgaattgaacttgataaataaactaaacttttttcaatattcgaaagttccaccaaatctttattgttaatgtcatcagacaacttctgatctaggctgttacgttcaacgtcaagttgcgttacggcacgctggaagtattgtgatgaatataggaaaaagagcatcaacaactcagtaacatctttagcttcagacaaacgctcccgcatatgttcatcgttgaattcatcaaacacatagctggttgattctgtatggaaagtaaagatattttcacccactactaaaaaagtgattgggtgtgaggtaaagtgcttaatcgtgttggtcggccaaattggcacatcgtaaacaagcaagtggctcttagtatggacgtcatagtcatagtgaggacgttcgtgacggtcagaaatataagagataatgtcaggcgtaaaattaaaatcctgctgcaatctctcactgtcttcttcacttaaattattgatgtcataccacttatactttgttcttaccggaaaattttgttgtctaatcaaccagctcacctcaacttttattttattacctagtaaatggtaccatttttctcaattctttttccacaaaaaaacagaccttacgatctgctctttgaaatctaattgctatttaattttattgcttccaagcagcatcaaatttttgcttaccagtattaatttggctgttagtattttgacccttttgggctgcagcaaagatattttgcaaaatgctgttcaattggttgtatgcagcatttgaattcttagcaacaggaacactgtacaagttcttcatagcatcttgaagtttagcaggaagcttaatgctcttgttattcttgtattcactagattcgattgcactattgtttacaggaatgtaaccagtagcattagcccacttaatttggcttgacttagatactaagaacttaatgtacttaaatgcagcagctttttgttcagcgctagcgtggttaaacatgtaaatatcagtaccttgttgcatggtgtatttgccaggacgtggagcaacatcataagtaaacttgttacctacaccttgcttaacaaagccttcacctgcagaagtaccaacaaacattgcaaccttttcgttagcaaatggacctgaaaggtagtgttctgaaccagctactctgaagtaacccttcttaataccatctgcatagaagttgagaactttctttgaagttgaaccactgaagttaatcttatcagtaaagttcacgccttcgtccttcataccaagagtgtagtagttggatagtgaatcaaaaccagcacctacaactttgtggttactcttcttgtagatagtttctgaaacatccttaagttcttccatagtagttggaactttcttgatgccatatttcttaaacatggtcttgttgtaagtcaaagtttcaattgacttgttaaatgggataccgtattgagttcccttaatttttgcaccatcaagaagttcagttctaatgtcagatgcctttgcactgccccaaccaacattcttgttgttgatatatggggtcatgtttacaagcatcttgttttgagctgcgttccaaagccaacctggataagcttgagtaatagtaggtaagttatttggtgattgcaaagttgagttgatcttagcttgcaaatcattgtatgcaccttggttttcaagcttaacagtaattttagggttcttcttttcaaattcattagttaattgctttaaagtagaaccttgtactcccggcatagcgttccagaagacaactgtagtcttcttagtaatctttgatggaatcttctctgaacttgatgaagaagaattgccgctctttgaacaagcagcagtgccaactagggccaaagtagcaacggcagccatagtaagtttcttactaaacttcatttggataaatcctcccaaaaaataaaactaaacaacaatatgtttttgatttactaaagcgtgattgtttgaccacgtttaggtaaaatccgttctccatatgggttctcttccagctctggatgcaatgtgtgcaccggtactaaaacagctggttgaaccccagcaatgatttccttgagttctttttcatcggcatggcctgaacagcgcaacgccttatactcaatatcattgttagctaaagcctctacaaatggtttgtaggcaggatcaaaatcccctaatggctcagcatttgagtggatatacaaaccacccttttgcagcttatcataatcggtgacaacttgccacatgtatttatgattatctgctaaaagctcatcatagctaacttctagctctggcttaaggtcagcatagtgctcctcattaggcatgtaatagtaaggatagtcttcatccaaactttcattaatcaaatgggcacgctgagcatgtaaaacgacctttcttggtgaatcggcaatgattcgcaataatcgttcaacattagtaggataagtattaaaagtgatttggcgttcaggattagccttttgcaggcgcacgatttcttcagttagttctacttcattcttagggccagtaaactcttcactgttttcatcatgcttttcttctggccaagaaacaccagtaccttcaatgattagcatatcgctatttttagctgcctgcataaagtcccgcacccaatctggatgatagccatgcaagcgaatgtcgccagtataggcgatttgcttatccggtgtcttaactaatagaccagtagcaccgtaagcgtcatgatcactaggatatatttccaggataatatcgcccaccttaattggtttcttgtattctgccgcgatgattggacgagtataagtccgatcatgacctgcagcaggaagcaagaagtcgcccttttcattcaaggctggcaataaatgagctgtaattggacctgcataaagtggaatttctggggccaaaaagttcattgccttactgtgatccaaatgtagatgcgaaatataggccgccgcatgctcccagcggtcagtatcaattggcttacccgttaatttaggatcgtaaaaattaggcacatccccgattaatttatttttaatcagagtttgataactttcatctggcaattttaactctggccgataaacttcccccaagtcaaacaatacatgcgatttgttataggccacttcaatcatcggtccaccaattgtggttaaaccattataaaaagttactgtcgttttatcctttaaggtcattgcgcactactcctcgaataatttgctttctaaagatgaagtacaaaatcaagattggcaaaacagtcaatgtggcagcagcaagttgaagttgagtttcactacctgcatcagatgcaaatgaagttaaaccattgttcaacaatctcatgctgtcttcgttagttaccaataatggccagaggaatgaattccaaccagaaatgaaacttaataaagcaacggtgaacaagccacctttagacattggcaccaaaattttccaaatatattcccaatcactcgctccgtcaatcatcgcagctttataaattgtctgtgagattgaaccgaagtagctttgcaagtagtacatgtagaaaattgaagttaaaaatggcaataccaaaccaatataagtgttcaacaagcccattctggcaatggtattgtagttagtaaagataattgcttcaccaggcaccatcaataatgataaaagtaccatttgaacaacacctttacccttgaacttcaagttaaccatggcaaaagcaccaagcaaggcgttaaacaaactcacaattgtcgttacactagctgtgataaaagtgtttaggaagtaacgagcaaatggagcttgggcgaatactttggcataatttgaccattcaaaatgcttaggaatgattgttggtggaatagtggttgtttctctaaaactcattaatccacccaaaatcatgtagataaatggaaagacagtaatgattgcgaaaatcgctaaaataatataagcaatcaaagtgccccaacgaatcttcttcatcctttactgtcctccaatcttcttcatcatcttgcgttgcaagaatgtgacaaacataatgatgataaataagacaaccgttgcggccatcgctacacctggagtaccaacaatttggaacttgttatagatgtagaacactgcagttgtggctgagttaccaacacctgcttgtccattgaataaggcataaacagatgtataaatcttaaatgcagcaatgatattcattgttaataagaaggcgatcgttggcacaagctgcggcattgtaatacgccagaacttttcagtaccagttgcgccatacatatccgcaattgtgtagtaattagggtcaatgtttctcaaagcccccatcaagataacgatgttaaaagctaaagaagtccaaacaccaaagatgataattgtcgtcaatgacatcgctggatcatcaatccagttcggtgttggtaagtgaaccgccttgagcaagaagttaagcaaaccatagtcaccgttaaaaatataacggaatacgataccaatagcgatagttgacgtaacatatggcataaagaaagtcgtttcaaagaatgacttatgctttatcctgctgaaaataaaccaggccaacatgattgaaatagccaaagcaactggcacagaaattagggcatacaaaatagtattcttgattgcccgccaaaattctggatcactaaagatatattgataattgctgaagccactccaatttagattaattaacgagccgctttgaaaactcattacaaaggcccgcaaaattggataaatactaaagaaagtaacaaagataattgttggcgctaaaaagagccacgcctttttctgattgctcttcattagtagacacgctctccttccttagtaaacaggaatactcgatcaagacgcatcttcaaattgatattatcaccaggcttaattggtgtctcaaggttgactaatgaacgagcttgtaccccatcatgggtaaacttcaaaattcgttcacgaccgattaattcgacatcatcaaccttagctgaaactgcaccatcttcttcgactggcaaaatattttctggacgaacggataaaacgtactcgccgtcagttaagtcacgtttaaaacgatccttgtctaaatcgtccacgttaatttcaaaatctgagccagtaatcttgccgccattaacctttacattaaagttatcaatcacaggattaccaacaaaattagcaacaaagtagttatttggttcaagatagaagttttgtcctaagtcatcttgttggatcacgccattattaaagagaataatcttatcaccgattgacaaggcttcttcttgatcgtgagtaacaaacaaggtggtaatacccacacttttaactaaagcacgaatttcttcacgaatcttcaaccgtaaacgtgcatccaagttactcaatggttcatccatcagcagaatcttaggttgttgcactaaagcacgagcaatagctacacgctgctgttgaccaccagataaattgcccggcttttgatcagcaagttcggtaatctgggtcgttgccatatatttttcagcaatcttcctcgcctcatccttaggcatcttttgcttgcccacagtcagaggaaacattacattctgaagtacagtcatatgtggatataaggcatagttctggaaaacatagccgatctgacgatccttaggtgctacgttaacaactgacttgccatcaaaaaggatgtcaccgctagttggattaagcaaaccagctagcatatttaagatggttgttttaccacaaccagatgggccaagcaaacatacaaggtcacctttttttacggaaaagctaacatccttgattgcttcatgaccgttatcataaacctttttaaggttctttacttccacgaatttctcatcattcataagtttcacgcaccactatatattgatttaaatttttaaatttttctattaattctaagctaaatatacgaaaataacaaataattttcatttgaaattcggggtttcaacgactttgtgaaatgcttctcagcaagtattcggcttttgttcgcatttgcttttatttttcacttatttctttttaaaaattcgggtttactaaatattgtggtaggtaccaaaaaagccatgaattagtcatggctttttgtatcataagttatctccacgttcaaattgatattttgaactattcaaggcttgacgaaccaacttgctcatcaagttcttagtctttttggtaatcacaccagcagtttcatcattagcgctagttaaatatttaataagctctctgccttccatatttttagctttttcatcaataagatcaattcggccaataccgtagctttgacaatcatcacgataggcgtttacctcataaatatattggtgatagcgtggttcaacaagcacttgtaaagttttatacaaccagtaagcactactatctgaattaaccatatgatctgccaccttatagttaagtggtgtatcctcaatattggtgtagaaaggaacatatggtgaatatgcataaaagcccatattaatccattgaattgcagccatcttggcaggaacatcatttctaatttgcaagatgcttgattcttggtttctgtctaaagcaatagaacggaacatcttttgttctttttctgaaccagatgaaaaagtgtccattggatcgtatggtgtaccgttatagtgactagttaaaaatctttgcacatcttcaacaccaatcttcttttcgggaacgcgcgtaaatggcatttcttgactagttgggtcttgttcaatgcttggattaaacaacttctgtccataccaagttcttggagtattgtaaaaagcatcagcttcatccttagtaccaaaaatatctctgaaagaaaagctaccgtcagtactattgtttaaatgattcttttctacgaattctcgaataccagctgaatacataaagttatctggatcatcaaagtcaacattttgaatcaccatgatgttaggacaaattgcgtaagaatcatcaggaacacgagccgcaacccattggtgacccgcgccagtttccagataccaaacttccttgttgtctgaaaaggcaataccgttgctttcaccggtaccatatttttcgattaattgccctaagcgcttaacaccttcacgagcagtcttcacgaatggcaaagtaatataaaccattgagtcttcgttgattccatttgctactaaaggatcatgtcctaagcagcgagcattagtagcttcagtttcagtggctgacatagcaacgttatattcgttaatgccttgctcgtcccagcgaccttctgaatcatcagcagtagggacagcagtccatttgcagccatcgccctcaaggtgcatcttaaagccgttatattttgatacataatcttcatcataatgacgggctgggtttaccacaaaaactttttcgttaatgccaccataaccgtcttcgtcacgcgcaatcatggttgatccatcgattgaagcgtccttaccaactagcattgcagtacagttatcttttttcattattgtttgtacttccttttttatttcagtaataatttttcatattattaattctactactcattaacctgcatttgccgatcaacttttgctcgaccgttattatagttaaaaacataaccgggctgcacgttatagagatagacattgaagtttaaactgccatcagttgaaacggcctgcaaattcacgccgcgggccattaactcattaccacgaaaaacagcagttgcttgataaattacacgcttattctgccgcagtgctctcctaaccttagcctcaaaaatagtctgaatcttttggttagaataagcagattgcgtaaacaaattcttaggattattttggtcccctgattgattgcgtggatcataattgccgctttgatcaattccagctgagactgaataggcaatcaagtggccccgattatagatttgggtaccgttacggtgattatagtgccagccagtcggttcaacatattgccttactcgcaagctatcattagccacattgcgcttttccaaaaaggctgtattagagcgcgatgttcgattcaatgaatcaaggttagagtaaatcacccgatttatcttccatgcgcctttgaccaaagtcgacttatcatggttgacttcggtataagcgcgactgccactcttaaaattcaaattagctaatttttgataatcagttggcgatagacctccataattggtcttggcttttgatgcatcgctaattgtattagttacatgttcatcattattgccagtaaagtcacgcaaaaactggctaccatttggatcgctgccagctttagtaaaaactccccataaaatcgcgattaagacaattaatgatgaaacaaccgttccttgtttttttcgtcttcttcgtgtcatctttttcctctaactacgagcccaatcatcaagcatgcttaagaaaaaggtctccgaaaaacgcttaatcttagcaccatttttgatcaaatcacgtgctgcattcaaatcctgattatcttttctaaagaaatcttgatcacccatgattaagtaattagtcgttgctaacactgaattgtcaacttggccgcccatattgttgatcatcttgcccgcttcagcttcgttcatatgaatattgccagacaaaacgatattcttattttgaaccggattgtgccaacctaagtcaacataatccaattcgccaatagttaggtcgatattcttaatcttgctttgtgccttttccaataaatcatcagtaaagtgctgggcaaagtcatcataaaccttgatcgtatcaagagaatcctgcaaaccgtggtgagcctcaacttgagcaattccagcccgctgcatgcagtcaagcagacggttatggcgctcgcgtggataatatgtccgcgccaaacgcaatacgtcaacgtaatcattatcaagcactggtaagccatatttttgacttaaatcatacaaaaagttcaagtcaaaattgacgttatacccaatgataacgtcatcaccaataaactcacgaaattcacgaatagcctgctcagccggaataccttccttcccaatttgctcttcagtaattccatttagcttagtaataaaagcaggaacagaattattcttggaaaacttcaccaaattagtatattgatcaacaatttgaccgttacgtaccttaaccccacctaattcagtaattcgatcgcggtaaggatataagcccgttgtttcaatatcaagcattgtataattggtcaaaaagtcaggcttttcctgtccttttttacgcaacttgtcttgcgcaccggtcacatgtaaaatcccattttttatgtaaatactcattcttcacctatttaattatttaatcaaattcatcagcatctcgtgcgaattgctatcaaaacccattgctcgtttcttaagatcagctggcaaatctgcatcagctaaatcagcggcaatataatgccaattaggaaattgctgcactagctttaccattggatcaagtaattgaggactggtctcatctacgcctaattccaaaattacgacattcttgtcctcggctcccgttagaaaccaacgaaaacgcgtattagcatcggtatcagggaagaagttagcattcagcggcatatgcaattccattggactattgcagtcctcgcactttggtactaaatctgccgttacgttgccgttcttaattgccgtcataaagcgttctactacttcatggttatccttttgaccatgattaatcccgctagaacactgcattttagtccaatcaccaaaggcattgaaaattcgattttcattaaagcctgcattttcaaaaaagtgcccgaatgtactggtcgcaataaaatattttttatcacgaattagcttttttagagcaagcatcgtctcactaggctcatattgtaaggaatattcgttgattagctcactccaaaaagcccattgctcgctccaagtatcaaatctcttatctaatgcatccccaattgtatgcacatcatacttatctgcaattttgccaaattgatcatcaaagccttcttcacttaggatatctagtccctcttctttggccatgccattaccagccgttacgatcaccgtgttagcatttttcagccatttttttgctgtcactaaatctgccattttatctctttccctttgaataacctgtcaagcgtaattgtccattaatgtattctcctaagaaaacatcactgatactattataacctgcctcttcaacttgttgctgtaaccaagcttcgcttttgtgaatcaactctaagacatcaatattagcctgaccatcactaattattgggaaacgaatgttagcttcatcattttcaataatagttaattgcccgttttgctcaaagatacaattcttaatcttttcaacagagtagatacctcgactgcgcaatttaaacattaattcattagcggagattcctgctttcatacagttgccaactaacaccttgccatttttaattacttgaacaggtttaccatcgataatccctctaatccaattattgtgatcacggctgaatttcaaaataaaaacaaccaacgtccaaacaattagaactaggaaaaactgaagaattgtaatactaggattgtaaatcaagccaccaataattccacctaaaacataattctgcaactgatctaatgcagtcgtaggagccagattagacttaccaaagacattgatttgaatgattaaagttaagataccgagagcaaacttaatgaataattgtgtgtaatctagctgcattattttattacctctactttatgatcaattacatgggcttgcgttaatgtgtaagtattgcgatcatcattaaggtttaactgataatcaatatttttagaatcaatccttacgatcatgccattagttaaaaccgttgaactaactaaaacatcagaagtcgaaacattttcatctttagcaatcgatttgatgaatggcacgatttgaatcgcctgtgatttttgcgtattaagttgcacatatttttcatattgcgtaccggcaaacaaaagcaaaaataataaggcaataatacccaaatcgcgatacttggttgcaaaacggttatgtaaatatagcaaagcaaaaattatcattgctaacgccgagactgtcaagaagtttgtgtaaataatctctctcgttgattgacttttttatttatcttttaatcaaaataggattctagggtgtctcgaacttgcccaaatcctttatgaatcctgttaaagtaacggtcattgtaatccattgcctgaactccaataaaggtgtcaagcgactgctcagttggaaattctgttttaggcttggttttccgcttaagcctgttgttaaaggattcaatcatgttagttgagtaaattgaagctctaatagctggcggatagttgtaaaaggttaacagatcaggctcaacctgtctaagatctctaactacgtttttgtaggctttttcccagttttgatagaattcatgcagcacctgtacagccatttctttgtttgactgagtatgaatctgcttgaattcatccagtgctttttttcgatcgtcaacccgcattttggcactgatattacgcatgacgtgtaccaagcagcgttgaaaatgcgctttaggataggactggcagatagcctctttcatgccaactactccgtcagacaagaagagctctacctgttcaaggccgcgactcttgaagcctttgagcatttcgctccaaatctcaatattttcagtaggcgcaatacagtagtcaatcacttctttatgaccattaggtttgataccgatggcgatataaactgcttcgcgctcataagtgacccgcttaagaggaatataggtggcatcgagataaacgcagaagaacttatctgacagatgtcgctgatgatatgcctcaactttgggaatcatttctttagaaatattggaaaccatagctggagaataatagccgccatacattttctcaatcaaatcagcgatttctcgggttgtgacgcccttggaatagagcttgataacagtttgctctaaaacatcagtatgccttttataatctggcatagtgtgttgatgaaactcaacgtttctgtctctaggaactttgatttctatttgtccgaattgcgtatcaaccttgcggtaataagcaccatttctagagttgccagtattccagccatttctggcatagggatcatagcccagaaaggcagtcaattcagcttctagcaagttattaacagcctgttgtagttctttgcgcaataaatcatttattttgtctggattgaatagagcttgagcaaaatctttggtaaaatcattcatgaaggagttcttctttctgtatgtgttttttttgttcaaaccaatcatacgagaaaggaactcctttttctaatgtttaaagaaataaatttaaggaatcattcatccttacacaaactattttacagtctcctaacgccgccaccaacatcaaagcatataatactgcctgattagtattctggttattttgaatatatttcattgtataaaaggtcatgctctacctcacccttcatatttttctttcattctaacacagaaaaaaagtagcactttcgtactacttttactagaaattattcacttttcactattattaattatttttgaatttcttttaatccagctttgcgacggcccatgttaaaccatggtgaaacagtgaaggctaacacatcattaattacatagatcaatgaattaattgccatggctaagtttgcatcaccttgagcataagttacgcccaaaagaatcaactggaagacgccactagcagtccaccaaaagtattgattgttgtaacgcataaagcacatgatcccagcagttaatgaaatagcaaaactaatagcatcaatccaaggacgaggatcattggtaaatttaccaatcaaaaagccggatacaacataaacaagtaaagtaccaacaatagcaacaagccattcctttgaaccgaattttcttaagtgattcttagtgtcatcattccatgatctaacagcaataataactggtaaatctaaagttgcaatataagcaatctgttcaaaaatggaaagataattcttagctgaccaacctgcatagataaaacaagcagctgaaatcaaccccaaccaaccattaattgctttagtagcgttaattgccaatacacaaagtgtacccaaaagcgtaccaataaaagtaatcaaagttacgcttgtaattttgccttgaatcagcaaagctaattgaaatccaaacgcaaaaaaccataaacagtaattttgaactggccagcctttcaattgattaaatagccaaacaaaataattttcgtgttttctttccattgtactgagacgtaaaaagtagacaattaaaatattggattaatagaggcttgacttcgatactctttcggggttaagccttttaatctgctctttatcctttcgttgttatagtattcgatatattcctcgattgcttgagttaattcttgaagattatgatacttgtattcttgatcatagaacatttcagttttgagcaggccaaagaagttctccattagcccatcatccatggagttgccctttctggacatgctttgagtaataccatggagttttaaagctcgctgataacgagggctttgatactgacagccctgatcagtatgaaaaatgcagttattaagagctgtttctttggcaaaagccttgtcaagcattgtcattactaaatccatatctggatgtttggagatagtataagaaactatatcgccaccgcagccgtctagaataggcgataagtaaagcttttcattattaagatgaaattcagtgatatcagtataccattttgtgttaggcagggctgcgaagaaatcacgatgaattaaatttggagctattttgccaatagtacctttatagcttgaatatttgcgcttattgcgcctgatgcctttaagacctaatttatgcatccaatagcgaacggttttctccgtaactttccagccctctctgattaactgcaaagctactctgcgatatccatagcggccttgatgatgattaaaaatctcatggattctagcaataagctttgaccgtttaggcttggcgggctgtcgtttgataatcttgtagtatgagcttctggcaattataggtagctcagggtgctctgcaatcgcagctaatacataatttaaactaactttgaattcttgccttagatccgtaatcaccctagctatttcttctgatcttcttggtccaaggcacttagtttttttacgtattcgttcacaatacgcaatcgcaagttttcttctttcagctgctggatctctttctccagttccttgcgagatttctgcttttctttggtcacgggcagggcgtcctttctgtttgataatgacattatacccgtttttcttatattctctaatccaattgttaagcatgccaatacttttaaaccccagttccaaagacagctgtaagtatggtttattgccaaagattgcttgttcaatagttcgctgcttaaactctttggaatagctttggtttttagtagttaaaatttctattccatgcatatcaattaatctaagcatatagtctaaattagctagattcattctgtacgctttagccaattgactgattgagatattttcatctttccatttatgataaatttctattttttgttctttattaaatttagacatagtaaacattctaagctaaatagtgaattagttatccgacgggataattgattcactatttttattcttttgtagaattaaagtagtggtaaaacgatatgccctgaggtctttagacacttgatgtcgcataataaactggcagttttacttaagttttcaatagtctcttcgaagaatgtggacactagatgtcgagtttagaaaattagatctgatttcttaagtaaatacgttttactactaagttttggaggtttttattatgcaagttacttttggaattgatgtaagcaagtctacttctactgtttgtgaactaattggtgaaagcaaaaatgaactaaccattactaataatcgtcctggttttattcaattgcttcatgaattaaccgctttttctaaacatccgcaaattatttttgaagctaccggtgtttattcacgcagactgcaggcttttcttgaagactacggctatgaatatgttgttattaatccgcttaaagccaaaaaagagatgaatatggggctacgctacaacaagaccgataaaactgatgcttatcatttagctttaattcaaagactttatcgccatccggttaatcaaagcgaatcccaaacttataagcagcttaatgctttgagccgcttctatgaccagctgacaagtgacttggtaatagctaaaaatcgacttcaccaagctctacaatcgacttttcctgaaattgaaaatttattttcttctgctaaaggtaaaaattactggcaaatagttgtgcgatatcctcattgtgacttagtaagaagagaagataaaaaacagcttattaactggttaatgagcttaaaggggattgcttttaaacacgctctaaggactgcagataaattaattgaattagcttatcaagcttatccagttgtatcttgctctagcatagaagtcgagcaagtgcagtattatgcacacagattgcttaatttaagtgatcaaagagaaaatttaatcgcaagaatggttaagttagcgaagtctttgcctaatcatgatttagaaaacctagaaagcattccaggctttgcacagaccactgctgtcagagttttagcagagttaggagatttacgcagatttagtaatcctaataaaatcaatgcttttatcggaattgatccaggcagatatcagtcaggagaaatggactctaatttaagtattactaaacatggcaatgcagtcgcacgtaagttgctttatcgagctattggacaaattgataatgcagctaagacaaatccgtgtcatatagcagattattatgaaagcaaaaagctatcctctcaaaccaaagggttcaaaaagatagctattgcttcaattcataaactaatcagaaccatttatgccctgattatcaatgatcaaccatatgattacaacgtagccacacataatcaaaaagactttagtcgtaattaattgatcaagtacattataacgctaagcccaaaaatcagatatggatctgggcttatttgtcgtgtctaactaaaaaaataaatcgacactaaaagatgtttaagttgaaatttaaacaaaaaatgaagccaaacttcttattatgcttgactttacgtagaaaaagacctaaaagtgtctaacttttaggtctcagttcacatcctattcaacattccccttttttattttaggttgcaaaatacaagatcttgtgccttatccgtgctatgtaaaaaaacatcgatatctagtatagtggaccattaattaaatacaagaattgacatttttaatttttgcgttaataacatatttctatttccgtttatcaagcaaacatttattaattttttctaaacagcaaaaaaattttgttccttttagtgacacagtgtcatatgatatatacgtgattattaatttatatttttatggaggtacactcatgtttaaaactaagaaaacgcaatttgctatccgaaaattagcacaaggcgcctcagcagttttactttgcttcggcatattgggcggagcaagtgcacctatcgttccagctgcaactacagatgacccaacaaaaacagtcactgaaagtacaattaatagtgagaatacttctttcaatattgaaaccaccaccaatgcatctgataaattcgcttccatcagcaaaaatgggggggtacaacggtagtgccaaattctgctgagccagtttctccggatcagtccattacagaaaatgataatcagcaagaaaaaactactgtagagaattctactgagatatctgagcctgtcaaagacatcaataagtttgataatgatgccaatgttgataaagacgaaacaatcactgtaaaaaagccaacaattaatgtcgacactgaaaaggtagaacaaggcgatgaaacagagaaaagtaaactcgaagaaattaaaaagtatattgaggacgtagccgcaaaacatccattaggcattgccggaattttccacctttttggtaacgaaatagatggatctgctcatattgcaggaaatgtcgcaacagacaaattaagtgctggcaacttcggtactatccaagatgccactagtaacttgactacttgtgatattcattacatcggcagtattgatcatttgaatcagattgatggcgaaaataaactagttatttttggtccagatgttgaatataaatcatacgaaaatggtagttccattcaggtaaaaataaatggaaattggcaaaaagtaggaattccatacaacaaaactatcagagctgaccaaattctagatattcaaggcgaactagataaattaagcgataaatcagacgaatgggctaagcaaacgcaaaccgaaggcgtaattgctgatttcaaggagggtaaatagttggatcgacgtttctaatgctatcaaggatggcagcaaagatcctatttatgtaactattgatgcaaaatacctttcaggcaataacaagcatgaaattgctattaaaggcatccctgcagacgcagaaacaccaatcatcatcctaaatgtaactaatgttcaaaatggcgatttaaccgttagcacaagacttgttttggattattcagaccaaactagcatcaatggcgtaagtgaaaaaccatctcaacttaataagttattatggaattttggaacagatgttaaaaatttaactattgaaggagacttccatttaggtagtattttagctactaacgcacatattaccgctaacaaaaatgttgacggtaatatcattggtaacaaaatcactattaaaggtgaaactcaccgttgggacctaactccgccattagtagaagttgaaactccgccggaggatccaaaagatccacctaaagaccccgaaaagccagagaatccacctaaggatcctgaacctactcctgagcctgaaccggaactaaagcctgagcctactcctgatcctgaagaagagagtactcccccattaccagaagaagtaattcctccaactgataatgaaaattcctctgacttcaaggaagaggacactgctcctctaccagaatctgttgtagaaaaacaagttaaaaagaatcatccatccccttcaactactgaagaaaatattgcacctcatgctgcgactatcccaacctcaactataactgaaaaagaaacagttttacctcaaaccggtgaaagccaagacaagctaatgacgattggactcatcactactagcgttgcttcattgtttgcagtattaggcacagtaatcaaaaaaagaaattaattaaaaatgattcaattcaagccatttttattcttaaaataatctagaattaagtgaggattaaaccatgttaaaaaatagactaaaaatattccaacaaattcttcctactaaggcaactaacactccaaaataccaattgcctatcaactattacgatcctgaaggcagcatggttggcacttattctggaattaacttggcggcaaatgaaactatcactcaccaccagctcaaaagatttatcaacatccatcttcccgaaaactacgaagtttttccttactttgcttatcctaaggagaatatcacctgtgaaaatctgcctgatgaaataatgatcacaatcagattatctaattaaaaaaggcgactcgattgagtcgcttttttcattgcaattgatattaatgttgcgaagcaccagttgtagtatctggttcttcgtgcttttcttctttaacttctgcagccttagttgaagcaccagttgcggcgtctggatcagaatttctacggtaagttgcaccagtagttgcatcatcatctactaccaatttttgaccagtagtctcacagaagtacttaactaatggatataagtctttgacccattcataaataccagcatagttaccttggtcgtcttctacacgcttataatagtccacaaccaacttcttcaaattgcctgttggtattggcatataaacatcatcatgacctgcttccttagtccgcaaagcatgaacaacttttttaacattcggaataacgtcacgaacatctgggtgaactgcgcgcatcgtatcacccacttgatctggcgtagctagcattttcttgttaggatcagttggacggttataccacaagaattggttattatcatcaacaaatgtcattttaccaatggtatttctcagcatccaattaagttggttaacagttaacagacctgcatcaagtttgacataatcgtcaccctccgcagcatgaacttttttagctgctttatctagccaatcaggatcatttttatcgattccctcaactgtatacttagacttaccctttgcatcgaaatcttcttttaagtattcatcggcattcatatctttaagccattttggttcagccatagtaagaccccctcgtatgaactttgttaatctaattatataatgtaagtggtttcaattcaacaattttaatatattttatataatatttttactagctggattatatattattttacgcgtggtgctagttaaatctttctagacaataagccaaattataagctaaaattgcaatttccaaccggctttgaaagcctatcagactacgtgctcgattgttctcggcattgtaataggtcagaagcgaaaagtcgctttcaattgttctgcgaatagccatcaattgatgatcattgtgctttttagctcctgtcatatttttacgatatggtgtccaaagttcgtaacccatttgttttagctgttgatgcagttctttgcctaaatagccttcgtcgccaagaagatagtaattagatggatgggtattttctatcagttcaactgtctccctggcatcatgaactgatgcctttgttacgacataatcaagaatgtaaccgtcatcgctaacaatggcatgaactttgaaaccatagaagtaaattttcttggtggccttataaccaatgttggcataaccgcgaaaaattttagcacgatagttgcgaattggttggcaaacaggtaccggaaagctgtcaatgatcaagaactgtccattcaggtcaacctttttattcatttcttgccgtatctgataaatcaattgcaatagctgacgtgaacgccgattaaaacgtgagtgtgataaacaattgaaacattcacagaatcttctttgtgattcaattcctgtcttagcttgccagataagtaaagccaaaatcagactgtccgtagttttaatttgatcaatatttcgccgatgagtaaactcagccggtgcatacaaacgataccagtgccgacaaattatcactaaatctttaaaactaacttgtaaatggtggctaaaacgcttaagcttaaggcagttcaatcagatcagactcttttctattattactatttacaagtcgagtctaacaagattggacttttttattaactaaaacgatttaactagcaccctgcgtattattttatataaaaaaagctgatcaacgagcaactctttacatctttgtctcaattgtatgagtgtccaaatgaatgatcacgtcaaacatcgctttttcttctggtgaaatcttatgagccacctcaataacagcaatacgtggattcttcaacagcgtcttatgaatgcctaacgacaagttcgggtcaagcgcacttgtcgcttcatcagccagcaaaatcggccgatctgataaaagcgcgcgagcaatttctactctttgaatttgtccacccgacaagccactgccgttttcacctacagccttgtctagaccctgttcctttaccaattcatctagaccagcctcatgaataacttctttcaaatgctcgtcactcactttacgtcctaacgtaatgttgaaacgcaacgtatcatcaaacatgaatggcttttggttaacataggaaaaataattatgggcagcatcccaatttcccgttacatccgtaccattgatcaaaattttaccgtctttgggctttctcaaacctaatagcaagcgaagcaaggtggtcttgccccaaccacttggcgccatcaatagaactttttcacccggcttaactgttaagttcacattctcaaagatgcgtttgtgatcactacctgtaacataagataattgttcaacctccataccatcaaaatgatcgatcttctgcttatcatctttcagcacgtgatgcaaagcgcgctgggtcttttcccacattggcacagtcgacttgacttggttaaattcgttaaaaagagtcacgattggcgtgataaagttcaaggccaaatcgaccatcattactaatgtacccacctttaaatttccctgcagcatcataataccgccaatagtacatggtacgatgaagcaaaacaattcagcagctgaataaattaattctagtgcccaagcttgagtcaacgtcatattacgcagagcgttctccattgcctgggccgcaccagctgctcgtgtaacgatgttggtgcgcacgttataaagcttggtagcctgtgccccatttaatgaatcggacacattttgcgtatagttagcgttagtcgttgcccaaatcttggacttacgtgtaatgataggactagtaatcatttgaactaatgctggcgcaagcgtagcaatcaaaaatactagggtcatctgccatgaactataaaaagcaaaagtaattgccccgaaaaacgacaaaccttggaaaatcatatccaattgtgccgttatccgattagtttcaatctgttttaaatcgttggtcatcagtgataaaccgctcttgatatcaggctcaccttgatcaaccaaataacgcaagttagtgcgcttaaaggtcatattcacgtcacgaataatgcccatctttaccgtttcatagacaaagttactggccataaaacacatctgacctaaggcagtcaaagcagccaggcgaatcaaatgcagataatcatgcgatcctgacgaagcaacattcaacataatttgtaccatataagctacaaagacgatgttgcaggccttgattgcggccaaaatggtatagctaataatttggctttttttagcgtacttcaggctcattaatttctccttttctatcccgttagaaacattatacccgctagcttgtctttttctcaattagatacgataattagagtaatcattttaatttttaatgaaaagcagaaaggaacttttaatgaagactggtactaaaattattactttagacaacggttatcacttatggaccaacacccaaggtgaaggcgacattcatcttctagctttgcatggtggtcctggcggcaatcacgaatattgggaagacactgcagaacaattgaaaaagcaaggcttgaacgtgcaagttactatgtacgatcaactcggttcactttattcagatcagcctgactactctgatcctgaaattgccaagaaatatttaacctacgaatatttcttagatgaggttgacgaagtccgtgaaaagttaggacttgataacatttatttaatcggccaaagctggggtggcctattagttcaagaatacgccgttaaatatggtcaacacttgaaaggtgcaattatctcctcaatggttgatgaaatcgatgagtacgttgcttcagttaacagaagacgccaagaggttttaccacaaaccgaaatcgacttcatgcacgaatgcgaaaagaacaacgactatgataatcaacgctatcaagatgacgtacaaattttaaacattaatttcgttgaccgaaagcaaccatctaagctttaccacttaaaagacattggtggaaccgctgtttacaatgctttccaaggcgacaatgaattcgtaattactggtaaattaaaagactggcatttcagagatcaattacacaagatcaaggtgccaaccctattaacctttggtgaaaacgaaactatgccaatttcaactgctaagattatgcaaaagaagatccctaactcacgcttagtaactacacctgacggtggtcaccaccacatggttgacaaccctgacgtatattataagcacttagctgactttattcgtgaagtagaaaatggtacatttaagggcgaaaattaattaacagatattcaggctggaatcgatttccggccttttatttttaaggaaaatgatatggatgaaaaagatgtcaaaattctgctagttgaggatgaagaaagcgtcgctagcttcgtcaaaactgaattagaatttgaggattaccaagttgtttgggctgaagacggcaaaaaagcattagacctttttactcaagaaaagccaactttaattttgcttgattggatgttgccagtatatgatggcatgaccgtgttacggcgaatccgcaagcaaagtgatgtccctattattatgcttaccgccaaaaattctgcctctgatataagctctgctcttgatcagggactagacgactacctcaccaaaccatttgaaatcgaggaattgctggcacgaattcgggtagtcttgcgaagactggaaaaaatgcggcagcaaaatgacgtccctgatacttccctagaatttggcccattaaaaattgatctgcttaagcacgaattttactgtgacaccgagcaaatttatcttactcctaaggaatttgccttaatcactgaactaatgcgggaccccgaaaaagtcaaaagtcgtgacgagttgcttgatacagtctggggatatgactttgttggtcaaaccaatactgttgatgtttatattcgaactattcgcaacaagataggcaatccctacaaaaagatcattaaaaccatgcgcggcttgggctattgtttgagaaaattagatgataatcatgaaaaaagctgatcctcaaacaactacgcaacaattaacccgtttattcgttaggctatttgtcgctattttaattctggtcaatttggcttttctaattatttcatcggcctatatttattaccaagctgaacggcaaagtgaacaagttgttgaagcagtaaaagaaaatcttgattcaaaatatgactggtcggctatgctggatgcttatttggcaaaacaagacgatgatgccatcattttaaccacccctcaaggcaaaagttattactctgaaaatgctcacgagacctttaaacaaattaatcgccaaaatcattatcaaaacatggtctattccaataagcatatttacttcttacggacggaaaactcgcatgactttaaaatcaaggttgcattaaacattgatcgcttatttcatttaattatttggctatttgggacaatgattgtcatcaacttaatcgctattctgctgagcatcccccttattcgccgttttgcccacaaatggagtcgtccaattcaggtaatgaataatgaaattcaagaaatccagcaaggtgcttcaactgagcaaatcacagtgccgcaacaaccattagagattcgaaaattagcccagtcttttaacaatctgctagcttttcaaaaacaggccttacagcgtgagcaacaattcgtcagtgatgcttcacatgaactcaaaacaccaatcgccgcaattcgaggacacgttaatttaatcagacgccatggtcaagccaaaccagaaatcatccctaagtcactggattatatcgatactgaatcaaaaaagatggaaatattagtcaacgatttactcaccttaggaagaatcgaacgcaatactgaagtcgtcaaaattgatttggtaagaattattaatgaagtagtgtcagaaatacagtcagtttatccacaaaaaatacagactgacatgccacaagtattgaaatatcgtattaattcactagattttcacaacattgtgcacaacttagtggaaaatgcggcaaaatattctcctcaagacagcactattgtagttaaattagctaaaaataaaggacaggtctctttcacagttgcagacaacggaatgggcattgcgccagaaaatcgcgagaagatctttcaacgttttttccgtgaagaaacgtcccactccaataaagttaaaggatctggcctagggttagcaattgtcaaagctgaagctgataagtatcatggtcaaattaaagttacggataatagtcctcagggaacaatttttacagtttcttttcctacagaaaaatgaagaaatcttcatttaaactctattaaatcttagttttttaaagctgcttagctagtaagataaatatatcaagttaaagcaaaacaaaaaattatcaatagtttaaaggagaacatattatgaagactattaacttaaagaaaattactattactggcgtagcattactcggcttaggaactgctgcaattaccgcaactaatttagctactgaacctaacgtggttcaagctgcttcaagcaaaattaaggtttcacaaaattcagctgttaaaaagtttaaggcaaaattcaaggcagctaaagtcgaatcaatcagcttagataaagaaaaaggccgttacgtttacgagatcgaaggcttcaattcaacgagagaatacgaaatgaaaattaatgccgcaactggcaaagttatctcatcccactccgaaagacttgatcgagacgagcgtaataaaaaagcattaaatctcagcaaaactatttctcgctcaactgctactaaaattgctcaaaaaagagtatctggcaaggcagttgaatggtcattagatcgtgaaggttcaaagaatgtttgggaagttaccatcagcaagaacggccaaaagagcgaagtaaaaattaacgcaattactaaaaaagtaatcagtgttgaacgggactaattgagaaaagaaggtatagaatagatgaaatttactaaactgacaagtattgcattattaagcgcagctttattaacaggaactgtagcatgttcaaaacaagataattcaactgctaaaactactacccaaaagagtgttacttcatcaaaggttacacataattctgaatcagcaatgagcaaacaaactcaaaaagataatattcaaatcaaattaagccagcaagaagccattgataaattccatcaacaatttagtggcaaacagcttaaaagcattgaattaaatcgtgaaggcaaacattacctttatgaaattgaaggattcgattcaaacaatgaatattctgttaacatcaacgcagaaactggtcaaattggacatgttcattcagaaaagttagatcatgatgatcgaaaccaaaaagctctagatttcaagggcaccattagccgcgacgatgctagtcgtatcgcagaagagcacattaaaggcactagcgaagaatggaaactagagcaagacgaagacactggtaaaacatactgggaagttaaggttaaaaatggtcatcaagaaaccgaagttaaaattaacgctcacaccaaagaagttatttcaactgaacatgatgattaataagattaagaacataaagaaagccgcaacattattctcgaagttgcggctttttattttgtctaatttttggataacttttttaccaataaccaatcagtttgaggatcgctaccaacttggaaagtatgctggctcactttttcaaatccatgacgcttataaaaatattgtgccggaatgttcttttcataaacgcctaaccacatgtaatctttgccttcttctcgtgctgtcttttctgcaaaatcaaacaaaacattgcccaacccgcgatgttgaaaattagtacgcagataaattcgttccacttctagagcattatcacgtaactgctcagtctgagcatccccaacattgatttttaaataaccagcaatttttcctttaaccattaaaaagtaaaaacgactattaggattttcaatctctctaatcaacttttccgtctgataatcttcctctaaaaagcgtttcatgtcatctggtgcagtataaggatcaaaagtcgttttaaaagtttcacgtgaaactttctgtaattctttcacatccgctgttgtaattgctttaatctcgtacttcatcaatatttcctctttccaccgttcttaaccaggtgccaattttcactggcattcttttctacaatttgtaacaaagcagctaattctgttctctgtttttgatctagtcctgtcaaaactatttcatttgaataagcattttctttttctattcgagcagctaatttatctcctaattctgtcacaaacaaatgcttaatctttttattctgctggtcattttctttcctaatcagctgattttgttccagttttttaatgctacgagctgccgtcgtccgatcaacattaagcatccctgctagatggtcagaaataattcccggattttctttaatgcgggctaaatacaggtactgacctcgattcaattgcatctctttaaattcaatattagcaatcgaatcaagtgctcgcgcaatagtgccaatttgacgcaaaatatcttctttcatgtttttcacctaaaaactattatatttaattttgttgtaattgcaacaataaaatataaaaactaaaaaagggatcgctccctttagttaattcatcaatttttctttagttcatttagatcgactacctgatcagctaactgcttaacttcatctcttaagtggtgagttaccataattacggttttatctttttgcgtcaaaatcaatctttctaattgtacgctagaagctttgtctaaggcagaagtagcttcatctaacagataaattggtgtatcacgcagcaatgcacgtgcaaaagcaacacgctgtttttgcccaccggacaactgtttaccttggtcagctaaaacagtatccatgccatcaggcaacttagcaattagatcctctaatccacattctttgatcacttcagaaatttttgcttttgaaacttggcgtcccaaagttaaattccaccctagagaagcagtaaaaatatatggatcttgctgcaaatatgtaatctgatcatgcaaatccttatctgaaatctggttatattccacatcagaaatttcaattttcccctgataatctctaagtaagccagaaatcaaattcagcagagtcccccatcagaatatatttatttttcagtttaaaatttaaattcaaattctcaaagataggcttatcttgtccagaatactgataagaaactttatccaattctagattgcttagtttaaaatcagcaggcaaagctccatcaacagttttaagcggtatagtcttaaatttttctataattggtttaactgatttgaattcttgccaattaaaactaatcccacttaattcagcgaaaattgtactggcaaaaaattgtgccccactgatggtcccgactggcgttaattgatgcaaaatcaaccagcctgtttgccctaaaatgataacttgactgataaaggctagaccattggtaatcgcctgagttatcccggctgttttactataatttagcgcatgttttttaacatcatcagaagcgccattgatctttttgacgattgtttgcggtaaattggcaagaaataaggtattgaagccattcaacacatcattaattgaattaaccaaacgttcattggcatgggtatattctaatgaccttttggccaaaattttagaaaacaaattgggaaccactcccataataattgtcaaaataatcacagtgaccacaagactgacattgaagtacgccaaagtgagcataccgaaaacaatttcactgatttgtctaatgatcatcatgaaatcctcgacaccaaagttattaatggttgtaatgtcattggtcagccaagaattgtaagtagctaccgtttgttgatgaaagcctgaataactcgtctgtgatagatcttgcgcaatgtcatttctaattaatttatccacattttgtgccaaacgggtttgctcaacattgactagacagttaacaatcgcgtaaaaaatataggcaccgcccattaaggcaacccacatgaaaaaacgctcagcttttaattttgcaactgcacttaaagcattagcgctagatattccggctagtgtcaaaaagcctgcattaatgactattaaaaatgtaacaaataaaaattcccactttaatcttttaaaatattgcagtaattccattgattctccttatattaaaaataattaaattaataactgaaacttgaaagctaagattaacgctccttccccgcgcctcttggctttttcttatcaaaaataaaaacgcaggctctctctgcgttatactttaagtgtcgacctaaaaagtaaaggagatcctgcgcaatgaacagtatagaacaaatcgacacagaaaatgatactaaatccttaatttcttcatttattaatctaattggtctagctaagttaactaaacaagtcaattttaagcgtaaatccaccgtttcattaaccatgattatctcttggctgatgtcagtacattttgctcggctttctttattcagagctaaggatgacaaacgtttttccgttagaactgctcgcaatgtacttaacgatggaagaatcaactggcaaaaactattatgcttgattgcagcccggctcattggctgcttaaaaccatttatcgataaaagacgccgacttgcttttatcgttgacgatacgctgatggctcggtctttttctaaaaagaccgaattgctagctaaagtctatgaccatgacaagcatgagtatttgaacggatatcgtggtttaactttaggctggagcgatggcaataccttcttgccggttaactttgccttgatgtcaaccaaaaccaagaaaaatatgattggagctgctcccattactgctgatgaacgttcaatttctggtaaaaggagaaatcaagctcagagaaagatgaatgatgtaactgtagagttgattagacaagccttacgattaggagtagaagctaaatacgtcttattcgattcttggttttcttctccaagaatgttttggattttaaagaagatcggtttagatggacttggcatgatcaagaagagttcaaagatttattacatttatcgccatcgccgctatagcgttaaagacttgtatgatcgtttggctgcttcaaacatccgtaaaaagaaacattatctttattcaagcatagttgaggctcaatatcatggacatagctttttattaaagctcgtctttgtctccaaccgtggaaacaagaacaagtatttggttttagctactactcagacaaagcttagccctgaagaaatcatccaactttatggtcgtagatggcaaattgaaacatattttaagacgtctaagcaatatcttgctttagataaatctcaagttcaaagctatgatggccaatgtggctatatcgcagttacagcaataacttatgatctattgacctggcaggaaagacaaaatacagatgataagacaatcggagatttattctatctaatgaacgaatccttacctgatattagattcgtagatgcattggtctacttaatttcagaattaaaagagcttaaacagaatagttttgaaaagatagatgaagtaatcaatgactttattaaccaactgccacgattcatacaaattgcactgaaacagatcatataaaaactaattacgtctaagaaagctcaatagtgacaggacttgagcttgattttggtgctttcaattttcagttaataatactatatttatgtatttgttcaatattttttaatactttacttaaattactgcaaaattaaaagggatcgctcccttttaattagtctacataagcatatttatatgaccattgcgtaccagcagtattatgaatgatgccgtgaactcgcttgttttgcaagtaagctgtggtctgttgataaatcggtgtaatagcctgattactatttacaatcttagctgccgaaatcagatcattccagcgtatgtcaggattattggcgtcttgattgccagcttttttaaccaaattatcgtactcagaatttgaccacttaccgtaattgtaagacgtacctgtcattggaatttgcataaatgtcatcgggtcgttgaagtcgccaccccaatgagagagataaatgtcaaagttgccttgatgtgctcgactggtggttgacttatcaggaatattggtaatatttatcttgattcccttcaattctttggtccattgtgactgcaaatattgggtcaattgatcactgtctgcttcatcatttgaagataaaacatcaaaagtcaaactcttttggccaatctcctgtaatcccttttgccaatatttcttggctagagctggattataatcaactgtatttttcactgcttgttctttagcaaaatctatacctgttttaggatttgcagccaaatcattggcaacaaagccttttggcagagttgagccattgcctaaaacctttttagtcacaatatcacgatcaattgataatgataaagccaagcgaatatttttattattcaaggcctttctattaactgcatttttatccttaaaattataaagcaagaaacgcactaacgaatatggatattgagtaaagtcattattgctcttcaagtttttaacttgctcacttgaaagtggagttaaatccaatttgccctgttgatacaactgataaccagtattgttagacttaactacttgatagtgaatcttgttcaacttgactaccttcttgtcccagtaatcattattcttaacaaatgaccaggtatcattagttccattccatcctttaatcttgaaaggacctgagtagacttggtactgagccttggttgcgtatctattgccatactttttcacaactttttcgttttgcggcccaaatagtggataagccatcaatactctaaagtaagcgatcgggcgatttaacttaaccactaccgtctttttatccggtgcagaaattcctaatgcattaggtgatttctttcctgcaatgattgcgtcagcattcttcacgccactaaaaagataggcatacggagaagcggtcttaggattcaagcttcttttccaagaataaacaaagtcctgcgctacaatcggatcaccattggaccacttagaatcacgtatcttaaacgtccaggtcttaccatctttagatacggtcccagttttagctaagccggctgttggcttaccatttttaccaagacgataaaaactttcgaatacattgccagtttgaccaaatccggtagacttactgatatcaatagtatctagtggagctgtggtgcttaaatttaaagtgccactttgagctgccgacttactactgctattgccattaccacatgctgcaagaagcattcctaatgaaatagtaacgactcctgctaaaactccctttagtttcgacataaattttcctttctcaaacaaaaaaatgggatgtactccaacacggaatacatcccattaagaaccacaactttttaactagttaatcagtaatagtcttaagatgaatcaccacatcagagcatgtcaaataaatgctgtttgtacaacaacattcagtgtattgacattgcatttgacgcttaaacatgtgattcatcatccttcttacttttgataagaataatcataatttattcgatcacgattgtcaacaaaaatctattgtataattatagaaaaatatttggagaaatttttatggaaattataaaatatggtccttacactcttttcacacttattagaacaatcctaacatttatcgtggctattgagcatatcggtatctgtttcttagaaatgtttggtaaacctgaacaacaagctaaggcttttgacatggatatcaattttgttaaacaagaagctgctcaagtttcactagctaaccaaggcatctacaatggtatgttaggtgtaattttgatcattgctttctttattttccctatccctattctttttaacgtatggaaattaattctaagtttaattgtcgtagtagcaatttacggcggattcactgcaactaagaaaatctttttagtacaaatgctacccgcacttttagcattaatttttcttttcatttaaaaatattgcatttttgtagcaaaaaacataagaaaattcaaagctcctagtgataagctgtcaccttgtgattatgtaatatataatatcagtaaacatatagaacataataacgaggtggaattcatgagaaaattttttatcattatcagcagcattattactgggttacttattgggataattggggcaacgatctatctaaatagtcaatcgtcaaaggtaagtaactttaccattcgaactactaatttaacagctcaaccgaaaatgatcagctattctagcaataacctgccacagattaatctctcacaggattccgccgttcagaaattcaaatcattatatacacatgcagtaggtcaactaccttagactgaagtctagggtttagtggcttgttagcttgcgctaaccagaacaccaacttgcttagatacggatttgacttaccagcagtaatcttttgactattgccgatagaggtcgtctaattaccaaagccttttaagtccgcgagttgctagcggactgcagcttttctaggctgcttcttttattttaggattctgccacttgcctaatcctttttctaagatgttcacggccgcattccaatcacgaatatgatgcatctgacagattgggcaagtccattcccgatccttaagggttaatttcttataaccgttttggcccataatactgccacattgatggcatctttgggtggtgtacttaggatcaattgttagaaattctttgccatatagatatgccttataagccagcatgttcaggaaactacgccaaccaacatcagaaatagcttgagacaaggcatgattcttaagcaggtttttgctccttaattcctcggcaactactaaatcgtggtttttgattaatgcagttgagagaacttgtaagaagtcttcacgctgtctgcgaatcttgtcgtgcagtctggcaactgataagcgctgcttttgatagttttttgctagccgcaaattgcgtccttcttttttagcccggcgctgcctgcgagataatactcgttgagcacgagccagcttctttttggctttgcggtaaaagcgtggattagcgaccattgatccatttgaatccgttaagaaattatcaaggttgagatctattccaagttgactctgcgtcttaggcaaggctttaacaaaggcaatatcgctgcctaactgcattgataagtagaattgctcgtcagcggtcttttttatcgtcactgtcccaattctagttgagatatgattaagcaagcgctctttaatcagttttctaaaaccagcaatgcggacaacgcctagcttaggcaatttaatatgcttagcatcaataaacctagctgtcccgttatcaagaaaagcttctggctgcttaggatattgacagttggtctgatatgaccagtcgctgcgttttttatggaaagttgggattccatgaccaatcttacgatagttgttccaagccttctgataattttgaatggcattggcaagagcgaggctatcaatttctttaacacgcaaaaagctataagtatcgcggatattctttggcttagccaatagttcgctattagtgactacttcttctgccaacctagtctcataattattaagaatagaaaaggcaaaaggcattgcttgatattgtctaacagctaagtagcccttagcatgataattacttcgattacgtcctacataagagttgtagacaaagcgctgcgcatcatagtttagcttaatgattttcttttgcttagaactaggataaaagcgaagcttaacgccaaaatgataggctaaactgctcatttttttcatgtgtttcacctcctcgtattatataaattgtaattagtcatattgtgataattaatcaaattagtatttgctttttgatcttcacatgttagcctctaattgtcattggctttggtcaactggtctaggttatcacctcctgcagttttgtctgctttataagtctgccacccagacagttcctttatgctctaactcacatgctgtattgattgcttctttttgctagtccttgagcaattgggattaggtgcagctttcaaagaagcaaccagtgaatacttatactggcgagattgaacttaagaactgtaattaggggttaacatgtgaagatcaaaatctatgatcagaaatttgaaagaaaggaggccatttccaatgaaattatttgtcggtattgatgttagttctaaagatttacaggtcgttgcacttgattcagaagatcaaaacaaacgcttaattaacgatagctttgtcaatgatctttatggtgctagtgaactgaaaaaacaaattttagatctagctcaaaataaacactatgatcaaatcattattggcatggaagctacatctatttacagttttcatcctgcttactttttccaaaatgacgaagatttacaaaagctcaatgtagagactgatgtaattaaccccaaagaaaccagcaggtttcataaagtctttgaagaaagtaaaactgatcctctcgatgcttattacattgctttgtatctaagctttggacattatcgagtaagcattgccagacaagacaactatcttgctttagagcgtttaacgcgtaccagatatgaattagttcaagaactgactcgtaccaaacagcacttcattgaagctttatattatcgggttaataaactaatcactgtcgataaagataagattaatactcctcttttcggtgctacaatgatgtctattgtaaccgatagtaaaactctggatgagatcgcggatatgcctaccgaagacttaatttcttacttacaggttaaaggcagaggacgcttttccgatccagataccttggctaaagcaattaagaaagctgttagaggttcatatcgcttaggcaaagtaatgactgattcaattgatgcagtgctttctgttcattacaacatgattcaaagctttaatgaatctattaaagatctagaaaaagcaattgatcgtatcgttgatgcattaccagaaagcaaaattctggaatcaattcccggtattggcaaaacctatacagctggtattatcgctgagatcggaagtatcgatcgctttgataaagaagaacagctggctaagtatgccggcctaacctggaatcaatatcaatcgggagatcacagcaacgaacatactccaatggccaggactggaaacagatatctaagatattacttgattgaagctgccaatctagcaagattacatgatcctgttttcaaaaaatattaccaaaagaagtatgatgaagctgtctactcgccgcataaacgtgcttgcacattaactgcaagaaaattagtacgagttatctttaaattgctcaaagatgacaaactgtacaggacaccgaggtcttaatttcaaaaattggtctaaatttaaaagtaaacaaaagtttaacattaaaaaaatcaacctttaccaaggcttagtttcatatactcaaatttatgatcaaaaagaacaaatatcatcgcctttcatttgacttattaccacatgactcatagattagatatttatattttacagggaagtcgaacatatgtctctattttttaataaaaaagctgactgctaggtcagcttggtcctatccatccccacattaaaatacggggattttcgggcgtttttcattaaatcgatcacacttagtttaagtaaagatatctatgtttatgacatagtaggctatgatgaccgtaaagactgtactattcaagttgacgcaactaataacaagattctaggtcagtctacgcaggtgcttgattatgactacgaaaaagatgcgtctttgaacctaaaaaagacaatttcacgccaagaagctaatgaaattgccctaaaagaattcagtggaggaacaccgatttcatgggaattaactgatgacaataatcaatcaatttgggaagttaaaatgatccacggtaaacacaaacataccgtaaaaattaatgctagaacaaaggctgtaatctaaaataatccccaacttatgcacaagttgaggattattttcttatcttttatctaggttgactatctgcacgtgacttgtaatcaccgttttcagtaccaataattagcttttcgccattcttgataaaatcaggaacttgcacaactaagccagtttccatagtagcaggtttaccaccaccagctacagttgcacccttaatctctggttgtgtttccttaacggtcatttcaacagttgatggcaattcaataccgataatcttgttatcatctgtaaagtccatatcaaccataatgttaggcatcaagaacttaacgtcatcacccaattgatcagctgaaacttcatattgatcataagtatcagtatccatgaaagtataagtattaccttcgccgtaaaggtattgagcctttttcttagttacttcaactaaatccactttttcagttggacgcatggtcttgtggacaactgcaccactcttaacgtcacgcaaatccatttgcataacggtattacccttacctggcttatggtggttagcctttaaaactttgatcaatttgccatcttggctaaaaatcataccttttttcaaattaattgcttgtaccattatttcttctccctttaatttaaacttacctttcgactagtttaaacacgctggaggcaaagcaaatttttttatcaacagtaaataaatcgtattcataatacctagtataccaaattagatgtgccgcaggtatatccgatcaatcaaatgtccgtcagtcttatgcaaaatcaggctagcacgttccttggttggcgcaatatattcacgcaagttgaccagattaaccatctgccaggtttcttcagccaattgaattgcatcttccagcggtccattagccattttatagtaaaaattatctggcttatttttatttaatttaagtacttttctaaagcgttgcatgtaccatttttcaatcaaatcttcttcagcgtcaatataaattgaaaaatcgaaaaagtcactagtcacaacttgtccactctcgggcaattgcaatgtattaattccttcaataatcaatacatcaggattttttacatgaccatatttcccaggtactatatcgcttaattcttgagaatatagtggataaacgatatccttctttccacttaaaacgtctcgtaaaaaatcactgagcaaagtcatattgtaactttcaggaaagcctttgcgaggcattaaattacgccgctttaattcctcattagggtaaataaaaccatccgtggtcatcaagtgtacctttaattctggataggttctactgagcaacaattgtaataaacgcgcagtggttgatttgccaaccgcaaccgaacccgaaataccgatgataaacggagctggtgaaaaacttttatgcaaaaatttgatttgtgctttttgcgcattctttttttgttggtaaactaagtgtaagtaactgatcaaactggtatagatctcatgcacgtcggttaggtcaatcacgtctcctaaagacttgatatcagctaattcttctttggtaatattgactttatctaagggagctaatttagcccattcatttctgttaaaactcgtataatttctcatatatcgtatccatattccttctaaaacactaacttattataatagaaagcgctaaaaatatgaaaaaaataatcctattcggcgattccatttttaacggatatcgtaatggtcaaaatacaaacctagtaactaatttatttcaacaggcactaattaattatgcacaggtggaaaacatttctaaaagcggtgctaccacagttgaaggcgtcgattatttggagcaaatttccccagaacatgatctagttgttgttgaatacggcaataacgatgccgcaacagcttggggcattagtccagaaagctacgaaaagaacttggctcaaatccttagtgcagtaggcaaagccattgttgtgggattgtgcaatcccaatccagaaagtgacatttttcaatattatggtgctgaaagactcgatctttttaacaatatcgcccaaaaagtcgcaaaggcacatggtgcacaatttgtggatattttacctgcaatgagaaacttaaaagacaaatcgacatattatcaagccgacgggcaacatttaactgatcaaggaaatgagtttttagttaatcaaatcgtgccagtaatcaaaaaagacttagcctaagccaagtccctcttcatcatcacatgttctacgccgccttcatcaaacggttcgcctacaacttgatagcccaagctatcatagaaaggctttacccgcatttgggcgtgacagtaaactgcatcaatcttattttgccgtaaaaatttatgcacagctgtaatcattttcgatcctagctgttgtccgcgcgcttcttttgacacagcaacgcgtcctagcatccatttaccatcttcttgaaacagacgacaagtcgctaaggcagtcgtctgtttttgattgagtaaataaacctgaacagcaattaggtcctcatcatctaaatctggtagagttatcttctgttcagccacaaaagtcgtgttgcgcaatctttctacgcaatagaattctctagctgtcatttcatcaatctttttaaaagtaaaattatctatcttcatattacttgcctaaccaactattgtttctgccaaaccatttttcattaagtttacgcaattgaccatttttttgcaattttgctaaaccttgattgaccttctgacgcaaagttttgtctcccttacgcatccccacagcgaacaagtccattggcacgcgatcattctgaattaccttgtattcgctacttttagccatgtgagcaatataatagtcggcataaacttcatctaacagaattccttgaattcgtcctgcattcagatccaagaacgaattagaaatcgtatcatataaaactgttttcttagcatgcagcacatcttgtttagtttcataccactgctctgctgttgaaccagtttgcattcctaattcataattcttcatttgtttaaatgaactaatgtcactatcttttttcacaactaaaacctggcgattacgtaaatatggcttgctaaaagctacttttttctgtcgttctggcgtaatgctgtaaccattccagagtaagtctatcgtaccgttacgcagctctgtaacgttcattgaccaatcaatcgtttgaaaagaaaccttaatgccatattgtttaaagactgccttagctaagtcgatgtcataacccgtcaattggccgtttttcttttcaaagcccattggtacaaaactatcgtctaagccaattaccacttgctttttgctggcaatcttattccatgtatcttgagtattagcttctttttgtacgctttggcaaccagttaaacataatgttaaggccaagacgatacctaaaatccattttttcattgcctaatcctcgcttaacggtcgaaccttgagcatctgatccgccacattctctgcaaaattcaagtcgtgggtgataatcagctgggttaaacccgatttttttaagcttaaaatcattttctcaacttccttacgtaaatttggatctagcgcgctagttggctcatcataacaaagaatccgcggtttcatagccaaagctctagcgatagctactcgctgtttctgcccacctgataactcataaggatactgctgttcacggccacttatttgtagacgttttaacaatacacgcgcatcctgctctgcttcagttttactcttttttaataccaaagtaggtgccaaagtgatattttgtaaaacgctcaaattaggaaaaagattataatcttggaaaacaacgccaaccttgcctgaatcataaggtttaccgtcaatcaaaatttcaccagaatcttttgtttccaaaccggcaataattcttagtaaggtggttttccccgctcctgatggacctacaattgtcataatttctccgtctttcaaggtaaaagagatgtcacgcaaaattcggtgaccgttaaattctttgctcaaattttttacttctaacatattctcacctcaactacttgtaataagaaaagtatttttccagctttttcaaaacaaaagcacaaatactgatcaacagtagataaattacacctactaaaactaacggtactagcgttacgtctctggccattgccacattgccggccctaagcaaatcacctaaaccaatgacataaactagcgatgaatcctttaccaagttaattacttcatttccaattgaaggcaaaacaatttttattacctggggaataataatcttggtcatcgtttgccagcggctcaagcgcaaaactttcgctgcttcaaactggccttcatcaatcgattggaagccgccacgaaaaatttccgcaaaataagccgcataattcaaaacaaaagcaaacaaggctgcttgatagcggggaaagacgatatgaataattggtaagccataaaagacaaagatcaattgcaataataagggcgtgccccgcataatccaaacataaaagttaaccaaccagcgtaatggtttaaacttacttttttcacctaatgagaccaaaattcctaatggcgttgctaaaattaacgtccagaaaaaaatacttaacgtcatgcctgctcctgacaaaagagcgggtaaaatttctgcaatatattttaatgacatactctcaccttcatttttctttcctaataaaaaagccctcttaggattaacctaagaggacgactgctcgtgattccacctcatgttcgcacctgctcacgcagaaatgcctcactaggttgatcattttaaaagaaaaaccctcatagccaaacggctacgagggcgaatgtaatcgcggttccacctcatgtttacaaattgctcacgcaacttgcctcaataagttcaataatcaacctttagctataacgggctatcccggattttcctacttttgttcagaagaccaactcacagatgtgattcatactagcaaatatcttatttccaccagcaaagactctctattactttgactagtattactatttctgttctaagttgtttttaatgttgaataaatcttaaatgatctagcaacttttgtcaattatttttcttcataagtatctggatcaacatcaagcaatggactcttttctccagtataaataatatctagcttatacattgcacgagaggtaatagtataaacaagttgagtttcatccaatttatggtaagcagctttagaggcatcccacatgactaccgcatcaaattctagtcccttagccaagtaagaaggcacaactagagtaccatcaactagtcgctgattagcagtcgcaattaaggtcgtgttttcaccttttttagctaattcttcatgcacaaatttagctgcagctaagtctttggtaataacagctgtcgtacgcttattttgttcattattatgcaaaacgttaactaaaacatcaattgcttcatcatcgttttttctgccccaaattataggcttaggacctttacggttaaaggcttcaatcttttcgccttgacgcaaaatttgcttggtgaaattggtcaattccttagttgaacgatatgatttcgttaattgcaccacatcagttttttcaggatcaaataagccagagatctgcttaagtaagctacgactttcatccttagtaaaaatagcctgattcaagtcacccaacattgtaaacttggcccgtgggaaattatacttcaagtaagctaattgaaatggagtataatcttgaatttcgtcaatgaaggcataacgcatctcaaagtcagtcctgcgaccagtgatcatgtcatacaaatataagtaagctgaaacatcattcatggcaatatggtgctgcttaaagttattcttaacttcttccacatgagccaaccaatcattttcatcaatattccacttagatagatcaaccatcttaggtacagctcgcaaaaagctcaggtattgtgctcgcatattcaaaaagtggttgtgcaaaatacgcttatgcacgcccttcaaggctgataatacaatttttctacctaaaaaggcctcttccttagcctcagactcaaattcttgatcaggtcgatcatataactcatttaattcagattggctcattccttcaatagcgtgtgccacccaagccttcttagtttctggcgtaatctttcgattcaacatcttgatcaattcttcacgcgttgcatcaattcggttggccaacttgtaattttcattgaaagaataatagatctccttaattttttccttatcaaagtaaggtttcttcttatcacggaaataaatattcttaaaaataacaccgcgcttattcaagtgctctgcataacgagtcaacaagttaaagaaattaactgaatccttaaacttagaaatattgctgtctgcggtttgatcttcaaactgtctgaataagttttcaacttccatacctggcaaccgtcgcgcaacaaactgccagtaagtcatttgaaccatattttgttcgcccatttcaggcaaaacattcttaatatagtcattaaacaactggttaggactgaacatgattacatcacttgaagtcaggttgccacgataacgataaagcaaaaaggctatccgctgcaaaatcgcactggttttaccagaacctgccgcaccctggacaaaaagcagatctgctttggtgtttcgaataatcttattttgttcgcgttgaatcgtcgttacgattgacttcatctgcgttgatgatttttctgacaaaacttccaagagcatttgatcaccgattgactcatcagtgtcaaacatgttcacaatcttgccatcttcaatcataaattggcgtttcttagtcatatcaactgtaatttcaccttcaggcgaattataagaaactttacccaatttaccatcataataaattgaagatattggtgcccgccagtcatagatcaagaagtgatcgtccttgtctgcaaaagaacctagaccaatataaatcgtctctgttcggtcctcatttttttctttaaaatcaacccgagcaaaatatggtcgcttctctaaacgctctacagtctctagctgcttagctgaatgttgccaagcatgttcacgttcactcaataattgttgctgctggtggattgacagtgctgtttccattgaagtggaataaccatcataatccaatttaacatcgtcaaaaaagtgtgaattaagctctcttgcttcgccttcagctgatttgatagatttttttaaagttttttcgcggtccttgatctgacccataatattatcaaggtgcttttgttcaagttctttttcgtttttttcagttttggctgtagccatctaatcaccttttctttaaaaattcgcataccattttaccatgaatagcgctttcataatagttttcctgctcgtgagaaaaatataaacccggatttaaaattgaagtgcaacactaagtgttaaacaaaaaggccatgaagacctaaacttgaagtgacgaaaaatcaagaaaggaagatctttatgaccaattcaaattctagcatttctaagcactatcatcaattaaccagcgtacaacgtggacaaattcaagcaatgctggattccggcataacttcccgtactgttatcgctcaagaagtcggctgccataagtcgacaatcagtcgcgaaatcaaacgcggaagtgtcctgcaaagagacagcagctatttattgtatgagcactattacgctgatactgcacagatttattatgagaagcgtcgcaaaaactgctatcagcgcaatccattgaagcattatgctgtctttttgagaatgctctccagacgctttaaagctaaatttgatgccaccagcatcgatgaattcgttggtgaattcaaaaggactatgccaggctacccttgtcccagcacaccaactgtctatcgctatattgatcagggcttgctggacataagcaatattgatctgcctatgaagctcaaaagacgcaggaacaagcgtcatcacggccatagcggtcatgctttgcacaagaagcatcttggcaattcgattgaacagcgtcctaaagagattgaagacagaaaaacgccgctgcactgggaaggagatctggttaaaggcgtcagacgcaagaatcagcctgctttaatgactttgaccgaaagaaccacacgctttgaagtagttatcaagattcctgactatcgggcaagcacatgccaaaggctgcttcaaaatgagattgacagacatcctgcctggtttaaatcgatcacgtttgacaatggctctgagtttgcggatatgaccaagatcaaaggctgccagatctacttcgcccacccatattctccatgggaaagaggcaccaatgagaactgcaatggacttctgcgtcaattcttccctaaaggcaaaagcatgaaagataagtcagctgcttatgttcaacaggcaactgatgccattaaccgcaaacatcgtcgaatccttcaatatcacacagcagaagaactcttcaagcaatatatttcctcatagcctaactgttgcacttaatttgacaattcagggagaaaaatataaataaaaattgatgaaaactttaactttagagactataatcttgacatattggggtgatatatacatgaaaagattttttaaattactgagaaatgttctcttgcttgctcttatcgctcttggcgtttggacttatcagaacaatcccaatattcgtatcgcaacgcaagactccctagctacacttagctatcgaattaacgaacttctaactaacgaaacgaccatttctcccaataacgaaaaaaagactactaatatcaaaactgacacagataaaacagaaaatgacgattcttcagacaatcgtgtatggtcaaatcctgaagctaaggtttatatcgatattagcaataatgctcaactaagatcagctgcagtcaatgcaatgaacgcttggaatcgtaccggtgcttttacttttcaccaaataaatgataaaaaagacgctcaaatcgtcattaatacagtcgataatagcgacactaatgccgcaggagaaacagcaactacctataaccctgctacaggacatttgttaaaggccacggtcaacttgaaccgttactatttgcaaaacgaatggtatggttacagttacaatcgaatcgttaatactgctgaacacgaattaggccacgcaattggcttaaaccacactaataatgtctcagtcatgtacccaaagggttcgatctatacgattcaaccgcaagatattaaaactgttaaaaagatctaccacgaaaataattaactttaaaagctcacctcttttttctacaataaagtgtgagctttttacgaggagaaaaatatgaaaagaatttatatcgtccgtcacggtcaaacttatatcaatcgctacaataagatgcaaggttggtgtgacacaccattaactacaccaggaattgaaggcgctgaagaagctggtaaagctttaagcgaagtaccttttgacattgcattgtctagtgatcttaagagagcaagtgatacctgtgagatcatcatgaaatataacgccaacaaagacgaattgcagcacatcgctagtccatttttcagagaacaattctacggctacttcgaaggaatggattccgaaatggcttggcgaatgattggtggcagtcacggctacggaacacggcaagaaatgtttgctcatgagagcatcgatactattaaggattggattaaagaagccgatccttatcaccaagcagaaaacgctgaagaatattgggctcgtcttgatgatggttttaaattaatcagtcaattggatggcgctgaaaacattctgctagttactcacggcttcactattagaagtctctggtatcgttatggtgaccatattcctttggttccaggtcctaagaatgcttcaatcactattatgacaatgagtgagaaaggcgaaattaagatacctaagtggaatttaatgcatttatagcaaaataagattaggcgaatcgggcctaatcttattttgtttgtttcccggatttaaaattgaagtgcaacactaagtgttaaacaaaaaggccatgaagacctaaacttgaagtgacgaaaaatcaagaaaggaagatctttatgaccaattcaaattctagcatttctaagcactatcatcaattaaccagcgtacaacgtggacaaattcaagcaatgctggattccggcataacttcccgtactgttatcgctcaagaagtcggctgccataagtcgacaatcagtcgcgaaatcaaacgcggaagtgtcctgcaaagagacagcagctatttattgtatgagcactattacgctgatactgcacagatttattatgagaagcgtcgcaaaaactgctatcagcgcaatccattgaagcattatgctgtctttttgagaatgctctccagacgctttaaagctaaatttgatgccaccagcatcgatgagttcgttggtgaattcaaaaggactatgccaggctacccttgtcccagcacaccaaccgtctatcgctatattgatcagggcttgctggacataagcaatattgatctgcctatgaagctcaaaagacgcaggaacaagcgtcatcacagccatggcggtcacgctttgcacaagaagcatcttggcaattccattgaacagcgtcctaaggaggttgaagacagaaaagctccgctgcactgggaaggagatctggttaaaggcgtcagacgcaagaatcagcctgctttaatgactttgactgaaagaaccacacgctttgaagtagttatcaagattcctgactatcgggcaagcacatgccaaaggctgcttcaaaaggagattgacagacatcctgcctggtttaaatcaatcacgtttgacaatggctctgagtttgcggatatgaccaagatcaagggctgccagatttactttgctcacccatattctccatgggaaaggggcaccaatgagaactgcaatggtcttttgcgtcaattcttccctaagggcaagagcatgaaagacaagtcaaaagcttatgttcaacaggcaactgatgccattaaccgcaaacatcgtcgaatccttcaatatcacacagcagaagaactcttcaagcaatatatttcctcatagcctaactgttgcacttaatttgacaattcaggattttgtttgtttaattatttttgcaaaacaatatttttatatagcttcactgttattaaaaaacttcctgaaactgtcaaatcttttgtgtaaatagttctttctcgtaaattgattttttaattatttatttaatcaaagtaggattctaaggtgtcctgaacctgaccaaagcctttatgaattcgattgaaataacggtcattgtagctcattgcctgaataccaataaaagcatcaagcgactgttcagttggaaactctgccttaggcttagctttgcgcttgatcacattgttaaatgattcaatcatgttagtcgaataaattgaagctctgatctgcttgggatagttataaaagaccagcagatctggttctatgtctttcaagcttctgataacatggctgtaaaccttgccccatttggtatagaagtcatgcaggacagctgtggcttcttctttgtttgtctgttgatgcacctgtttgaattcgttcatgatcttttcacgatcgtcgacgcgtactttagcgcagatattgcgcatgacatgaaccaaacagcgttgaaaatgagctttaggataagtcctggccaaggctgttttcatgccaacaacaccatcagaaagaaagagttcaacttgcttcaagcctctggacttcatgttttgaagcatctctgtccagacttcaatgttctcactaggagcaatgcagtagtcaatgacttccttatgtccattaggtttaatgccaatggcaatatagactgcttcacgctcaacgctcaaacgtttctcggcgcaaaggaaggtatgtcgcatccaaatagacgcagaaaaacttgtcgcttagcttgcgtttgtggtaagcctcaacctttggaatcatctgcttggaaatatttgatacctgagctggactgtaatggctgccatacatcttttcaattagatcggctatttccctggtggtcacgcccttggagtaaagcttgataatcatgctttccaagatatccgagtgctgcttgtagtcaggcagcgtgtgctgatgaaattgaccgttgcgatcccgaggcacttgcacttcaattgggccaaattgcgtatcaactttgcggaaataagcaccatttctagagttgccagtattccagccatttctggcatagggatcatagcccagaaaggcagtcaattcagcttctagcaagttattaacagcctgttgtagttctttgcgcaataaatcatttattttgtctggattgaatagagcttgagcaaaatctttggtaaaatcattcatgaaggagttcttctttctgtatgtgtttttttgttcaaaccaatcatacgagaaaggaactcctttttctaatgtttaaagaaataaatttaaggaatcattcatccttacacaaactattttacagtctcaacttcctactatttttaacagtaggaagtcttactctaactaatctttagtcacttgttttagtttttattaacttacagtcgcccaaagtctgaatcaattgtttgccatctttttggtggaaaacagcgttttgatacgacaatcgttctttctttttactcttatctttatactttttaataaaggttacttcatagttaatccgactataattacgcttacctggtaaaacagagagcaccttgatctttacacttaatttcttgatactcttctttttatgccattcctttagttgcttagcaatcttcttatagtctgcattttcttttccattttcaaagtcatctgcatttggcgacttaagggtgttgtacaatagcttagctgcatccccaaccttaatcaagccaggccaaatcgggttaacaatatagtcaccttctgcatcctgatagacatctttttcgccattgccttgatattcagcagtaccatcataatcagtgacgtcatcctcactattagaaaattctgaactaatcgactgcgacaaatccgttaccctttcggacttaatagtttgaccatctgccttactcttaatatagatttccattcgcttagcaatcggataatccttgaaagtatagctaccatgctggttcaatttacccgccttacgatcattgatatagatcgtaccattaggaacgctgcgcacttggaaagtggccgttttgatcttcatatcaacagtcttatctgaccaaatgttaacaatcgaatcagcatctaaatggcgaccattaaccttagatttaactaatatatgatagcgaccaggaaagaccatacctaaatcttgatagtaattctgattgccaccttccatttcaccataatccttttggttaaccgtcaaagttgaattagcgtgattggtcttcacctgtgggcgatatacttgtatccacaacttatattttggaaaaagcaaaaaattgcgtccatcttgaatcagtctgatttcaccatgatcgcgattatgacgcaaattataggctaaacgtttagctgcactgtgatgctctttaaagtaattttgaagcggcttcagcgatttatctgtcacatccatatcaggcgttgaagccgtgacatactgagctagctcagttttaggatcctgcattttagctacaatgcggtcaatttgacgttctttagtgtaataaaaattgccaattagccatgcaataccaattaacaggataataactcccgatatccaaattttcttatgttttttcattgatcaaaacaccttttcacaaatccttttaacttagattaacaagttgatcaaaaaaagcaaacatcttttgttcacaaatcaagacgaagttcttattatatttagtagcattattttattttggaggggattgcacagtggaagtaaattttgattttgtaaaaaatagcagcttcaaggaagcctttcctaccgctgaaaaaatccacaaattatacacaattgatgattatcgtgacgttatttcaaattcacgtcttctattagagagtctaatcaaaaaaatttttaagttagaaaatctcagtccatattacacagttcatgatggcgaacaccgtaatttgcgtaataatacacattatttacgcaatgaactagattaccctctttcgatcatggatttatttgacgaaatacgctgcatgggcaacgctgctgtccacgataaccaaattgaaccagatcaaaagcaagcctggcactgtatttgtgatttacacgatattcttgtctttttaattaacagctatgacggtcaagacctatattatttgcgtcccgatattgcgatggaagcacaaactgatgaagaccattattatgtgcgccaaaataagcaaccaaaaataatgaaattgcatgatcatcaaaatactaagaaaaaacagtccgcatctgcaccaaaaaaggcgaaacatgttaaacatttttccagtaaacagcatatagagcaaactaactctgagtcacaaacgaaaactactccttccactaaagacaattggttaagaaaaattaaagaactctttcaccatgattagtcatattgacactatgtcacaatatgataaactatatattatataatttacataccgagaagcgcctatgacgctgccgatacgcaaatgaaaactgaacaagtttctcaaatggggaacggcttatgctagtaggtcgttttccattatttttttacgaaaggagtggttagtccgctatggataatcacaggcaaaaaccttgggctgtcgaacagtctgaggtattaacaaatacaaaaacaaccgaaactggtttaactgaagacgaagttcgaatacgccagcaagctggtttaaacgagctcgcagctaaacctcttaaaacagtaatccaaatggtcaaagagcagatttttgatccaatgatcggtatcttattagtagctgccctcttatctgctatgtttggcgaatataccgaagccattattatcgcgacaatcgtggttcttaataccattattggagtagttcaggaaaagaaggcacagtcttctttagctgcgttatgtgacatatctgcgccaactgcccatgtaattcgtaatggcaaagaattaatcataccggccaaggaattagtagttggtgatattgttaccttgcatgatggggacatggttccagccgattttcgcttaattgaaacagctaacttgaaaattcaagaagcatcccttactggtgaatcagtaccggtagaaaaagacgcagctgctgttttaaattcagattgtgctcttggtgaccgcatcaatatggctttttcttcctcaattgtgacttatggtcgtggtcaaggcgtcgtgacagcaattgggatgcaaacagaaatgggtgccattgctggcatgttagaagatcaaactgaagtacaaacaccattgaaacgcaaattagctaaagccggcatggtcttaacgactatcggcttaattatttgtagtttggtctttgcaattggtgctttctatggccgtccacttttaccacaattcttggttgctatctcattggcaatttcaattattccagaaggtctgccagcaaccgcgacaattgttatggccttaggcgttaaacgcatggttaagcgtaacgctttgatcaaaaagctgccagcagtcgaaaccttaggtaacgccactgtcatctgttccgacaaaactggtactttaaccttaaacaaaatgactgttacacaggcagcaacgaatgacttcagccaaagtcacgtagttgaccagcttgcagcaaacaaaaccaatcaaactttggcctatgctagcgctctttgtaacgatgccagcttgaacggtgaaaaagagattggtgatccaactgaggtagccttaattccttttgcccaaaagcttggctttaaccaatctaacttaaagaaagaattcccccgtttgttcgaacaaccctttgattcggacagaaaacggatgacaacattgcacaaaattgacggtcaattaacggtcttcactaagggtgcaacggacgaaatgttgccgttatgtacacacattatgactgacaatggcgtgcgtaaaattacaccccaagacaaaaagcaaattgcccacttgtctcaccaaatgcaagctgacgctttacgagtactaggctttgctaccaaaatagtggataacttacctgaagcaaatgctgatttggaaaataatttgacttttatcgggattgtcggcatgattgacccaccacgaaaagaagttgcagcatcagttaaaacctgccgtgaagccggtattcgcacaattatgattaccggtgaccacaaggtaactgccttggcaattgcgaaaaagttaaacatttatcagacaggtgacttagcaatctcgggaactgaattagaccaaatgtctgatgcagaattagatcaagctgttgaaaaggctaccgtttttgctcgcgtttctcctgctgacaaactgcgcatcattcaaagcttaaagcgaaattgtgaggtaacagctatgaccggtgacggagtaaacgattcacctgccttaaaggctgccgatatcggtgtcgctatgggtgtaacgggtacagacgtggctaaggacgtggctgatatgattttgcttgatgatagttttaccacaattgcgcacgctatcaaggaaggtcgccgcgtttaccgcaacatccaaaaagtaattcagttcttgctagttggtaacattgctgaaattaccactttgtttgcggcaactatttttaactgggatgcgccattattggcagtacacatcttgtgggttaacttagctacagctactctacctgcccttgctcttggcgtagacccagcaagtaaaaacattatgaaacacaagccagttaaagctggtactttattcgaaaaagacctagttattcgggttattacccaaggaatatttgttgccctgcttactttaactggttacttcattggtaaagaaaccggcaatcaagttgtcggacaaaccatggccttcagtattttagcattggcccaaatgattcgttcatttaaccagcattcaaatactgatcccatctggaaaagatcatctggtaataatccatggttaacagtgtcattcattatctctgcatttttcatgggtattattctctttgtcccagcaatgcaagatgcatttcacattaccagtttgtcagctggacaatggttaatcgtagttaccctagctttactttcaattgcacaagttgagttagtaaaaggttgggcaaagtttagaaatatttttattaatgacaataatttaattgaagattaattagttacaaaaagacggtagtacaacactatcgtcttttttgatattaaactttggctgctgccaattggtcaacatctatctgactacgaccaatctgaattgccttttcggtactttcattcaagctagcattgatcatcttatggctaagctccagcaccattggcaaattaacaccgctaattacccgtactcgctcaggatacatatcttcatattccgaagcgactaagtggggtgtcccattttttaaatcagttagcaccaaaatctgactattctgatatttattcatgactttagcaaaacgagccttaaaatctctgattcctgtgtcgtttaattcaattgtcaggatctgatcattcttgcctgccaacatatcatgtgcagacattagccccgcagccaacccttcatgagttgcaattaaaagttccataaaacgcacctctttgtaagcgatttctatagaaccattttaacatatttttgtattaattaagctgttcaatatctgctaataagctactttgttcaggtgttagccgctcatccttttgccgtaacttaagtacttgtagacaagtgtgcaaaatcttttttccttgttccgtcacttgtttgccatccatatcaggcgttacactggctaaaaagtcatccatctcatcagcagtaaccttgaaaacatcattttctccatgaatcaagggcatccgattgagcatttcttcaatcatttgtaatttatttctagcttcttcaaaatctatcttgttcacatccaattctttttcttttattatacaaaaaaacagccacctaagtgactgtcatctttatttcgtattaataattgcgtttgaaattgtagttgcattagattcgatcagttgatgtgaattattaataaaaagggaagccccaattcctatagcagcaaatacaagccaaactttctgtaaaactgtactcttcatgttcccagctccttatatttcttattatataaaaagccgatcgttatggggatggctacgcttacaattaacataattgtaatattatttacctttacttaagagttacttctccagcaacatttgtatcaaaaaagtcagcaatttgatggacgtccatcccttgccctaaagcccacattaatttggtaatcgcactctcagaagtcatatcacaagcagaaatagctccttccagtaaagcctcacgccccacctcatatttggtcaaatcgctacgttcatacaagcattgactgctggctacaacgggaataccttgacgaattagcataccaattgcggctaccatgttgcggcgaataaagttcatcccgcctagaccatatgcttcaataacaattccacggcaaccactattaaccatcgcaaaaagcagattaggatcaaagcctggaaatagtttcaccaacgatacgtgtgaattaattttggtattcaaggttggctgaccgtcatgttctctttgaaaatgttctgaattaaaaactaatccatcggaagaaacggttgctactggtggcacattcacactttcaaaagcatcaaagttggtagtccgcacctttacactgcggcagcccagcataactttattatgaaaggctaaataaacatcaggtggacaagttgctgcagctgcaaaagccaaccgtaggttatcgtgagcgtcacttaggaccacgttaattggtacctgacttcccgtcagcacaaccgggatattaatatttttcagcataaacgacaacattgatgccgtataagccatagtatcagtaccgtgtgaaacaacaattccatcgtaatcattgcggtatttgtagatattttctgcaataaatttccattcttctggttggatattagaagaatctaattgcaaaatatcgcggacttgaatgtcgtacggcaactttcccaacattttaattaactcttcaccggtttccttgggtactaggcctgcatcagaagcaacggaagcaatagttcccccagttgatagcaataatattttcttcatcttgttcccctttatctcaaatcacaatgtcgaccataactattcatgattagatcaattaaaacataggccgaactaaaagttaccgcattttgcttactaaattgaaatggcgtagttttgaagaaaaagctatagtcgctaagagaggctaattttcccgtttgccagctagtcagtgacaccaatttcagttcagtattcacgacatcaatcttcttaagttcttcaataattgttttattaaaaccaccaaatgaaataacaaacagcatgtcattttcccgtgcagaccgccctaataatgccacttcgtcgcgtgcactaggcaaaataattgcttttttaccaattaagaaaaagttatgcgccaaatattccgcgataatttgctgctgccagccagtagagtaaagatagatcgtttccgcttgatctaaatccgcaaaaaatggttgtaagtttaatcccttaaaatatttaaaagtttcagcaatgatcttttgtaaatccgtattgaaatctagcgtttgcttgttcttaacgttttgctcctttcgtgtagctaactcggacaattcaaatttcaattcgctgaaaccgcttaatcccaattttttgcttaggcgaaaaatagcggacttagaaacgtataatttctgagctaattccagcaaactcaactgacttgctacttcaggatatttcaataaatagctaacgatcgctttatcggtctcattaaaactttcctttttcttcatgaccgctgtttctaaatccattctgtttcctttctcatcactgtttcttattaagaaaagaatatcatgtcgtactcaaaaaaggtagccaccctatttgagtaactaccttaatttttattcttgaattgaagttatgttatgacaattaattatttaagttctggccagtatggagcattaactggaatcatgtcatccaaaatcttcttagcaacggaagcatctggtacagtcttgtttaatgcaaatgcttgcagcatcttattgtatgaatgttcaacataagcatcaacaaccaatttttcacaagtttgttgttccatcatcaagcctctttggaagcgacctgctttacccgtagccattggttgaatgccatcagcaccaaacaatgctggtacttcaacaattgaatctggatccatattagaaattgcaccgttattagcacagttagctaagaacttttcatgagtgttaaatgcgatcgcatgacaaatatctacgatatattcagagtgcaaacctgaaatatcccaaatattattcttagcagttcccacctttacgattctttcacattcgccaaagacaatcttttgccggtgttcacgaatttcatcagtacgagtatgcttcggatcagcattagcaacttcatattgtgggaagtagtagtattgcatgtaattgtttggcaaagtttctggctctagcttatattcatcggcaactttcttaaaggtggcttcccaagaagcttcagtatccttgtcgtaatcgccacctacccaatagccgtgctctttgacatattccttcaacttaggcattaagtcttcgccagtcttcttgttgcgaacttctttccaccagccaaaatgattcaaaccataatagttaaagtcaatatcatgccaactgtccaaaccacaaatggcagccattctgtccatatcatcaatcggcatatcacaaatgttaattaccttagcatttggacgaagacgacggcaagcttctgcaacgattgcaattgtgttggagtagttgatcatccaagcatttggtgagtattcttccatccaatcaataatttgcaaaattgcgggaattgagcgaagaccataggccattcctccgggtccagtagtttcttgaccattcacgccatattttaatggaatcttttcatccaagcttctcatgtgatatttaccaacacgaattgatcccataacaaaatctacatcagtaaaggcctctttaggatcagttgtgtaagaaaacttaatttgaggtgctctttccttcatgataatttcaacagctttggcaatcttttcttgccgttcagcatcgttatcatagaacttcaactgtcttaatgggaatttatcctgactcttgattaaatcaaggacaaatcctggagtaaaagtactaccaccgccagcaataactactgaatatttcttaccatccataatctattttctcctttaaataaaactaagtttttatctctgtttcatttgccttacgcatatatttatatcatcttctcccacaaatgtattcgttttcaccagcttcagactttgtttcaagttttggaacgcgtttcactacgcgaaatatttttaaattttgccttaagcctaacaaatcaggtgtttaacttgcctttattagtaatagtgtaaaaatgaaaaaaataatcgtttcatgaccaagataaactataatttgaacattcctttaaccacaaaaataaatagtccgtatttgatgatcgtatagttttaatgaaactgtcaaatcttttgtgtaaatagatctttctcgtaaattgattttttaattatttatttaatcaaagtaggattctaaggtgtcctgaacctgaccaaagcctttatgaattcgattgaaataacggtcattgtagctcattgcctgaatgccaataaaagcatcaagcgactgttcagttggaaactctgccttaggcttagctttgcgcttgatcacattgttaaatgattcaatcatgttagtcgaataaattgaagctctgatctgcttgggatagttataaaagaccagcagatctggttctatgtctttcaagcttctgataacatggctgtaaaccttgccccatttggtatagaagtcatgcaggacagctgtggcttcttctttgtttgtctgttgatgcacctgtttgaattcgttcatgatcttttcacgatcgtcgacgcgtactttagcgcagatattgcgcatgacatgaaccaaacagcgttgaaaatgagctttaggataagtcctggccaaggctgttttcatgccaacaacaccatcagaaagaaaaagctcaacttgctttaagcctcgggatttcatgttttgaagcatatctgtccagacttcaatgttctcgctaggtgcaatgcagtagtcaatgacctccttgtgcccattaggcttgatgccaatggcaatatagactgcttcacgctcaaatgtttctcggcgcaaaggaaggtatgtcgcatccaaatagacgcagaaaaacttgtcgcttagcttgcgtttgtggtaagcctcaacctttggaatcatctgcttggaaatatttgatacctgggctggactgtaatggctgccatacatcttttcaattagatcggctatttccctggtggtcacgcccttggagtaaagcttgataatcatgctttccaagatatccgagtgctgcttgtagtcaggcagcgtgtgctgatgaaattgaccgttgcgatcccgaggcacttgcacttcaattgggccaaattgcgtatgaactttgcggaaataagcaccatttctagagttgccagtattccagccatttctggcatagggatcatagcccagaaaggcagtcaattcagcttctaacaagttattaacagcctgttgtagctctttgcgcaataaatcatttattttgtctggattgaatagagcttgagcaaaatctttggtaaaatcattcatgaaggagttcttctttctgtatgtgtttttttgttcaaaccaatcatacgagaaaggaactcctttttctaatgtttaaagaaataaatttaaggaatcattcatccttacacaaactattttacagtctcaacatcatatttgcccatgaaaaccacggtcgagtaaaatcactaggatcattaggattaaaactctcatgaatcatattgctaccattggttgtgttagccattaaatacaataaattctgtttttctgctttagtctcttgggttaaccctactaatgccatacctattggccagatatttcctttaggagtatgcggacttccttgaccactccaatattcaccaatatagaaatatggattatctggagacaaaatgaatcttcttgtgttttgataaatgtcatcagtaggtttaacgtaaccaatataaggagcagacattaagctaggaacattactatcatccatcagcacatagttgcctctaccatctacttcataggcatattgctttttaccattgtgctcaacaataccatacctttgaattccttcattaatttcattttgcagtgttttagcctttgcaactatatctgaatcatccaaaatacttgaaaatatttcttgaatataatttaaaactactacggcaaacatgtttgaaggtatccagtatccatatgtacatgcgtcatcactcggtctaaatccagaccaattcattcctgtatatgccacaggcgttcctttacctttattctttaaagtatcagttggaacatcacagtccctttcaaaggtgtagttagaattctcatgatgttgctcagttttaatagttgccagcatctttttaattccagaaacaaaatttgcatcaaattgagctgtttcacctgtgttcttatacagtagatatgccagctgtactggataacagagtgaatctaattcatattttctctcccaaatccagggacccatttttgctttatctgtttgatgaccttgattattggcagtcatattaaatgcattagcataaggatctaagttcatattaaaaaattgccgttttactactcgagtaataatatccttaatgttatcgtcagttttagctaacaataaatatggtcttaattgtgcagatgaatctctttgccacattgccggaatatcaccggttaatacaaagatatttttattttcatcgacctttaaagcattctgcaaagtatctaagaaagtcttgttaaaaattgtatataaacgttcatctttagtgccacattctgcttccacttcattcatataattctttacttgttcatcaataatgtctttcattattttcacccccagccaaattataaaacgcttttataattaaaaagaagacattacttttcaccttattgtggaaaacaaataagccattgcctgtatttttacaaagcaatggcttattcattattaaacggttattcctcacccggtgcagatataactattctcattttaccagtgaaagtgaaattcttcatctcatttggaataattaaattagttccgatcttcaaatcatatgatttgccatcggcttctaattttccttcacctttaataactgaaactaaaagatatggatgatcctttaagccggtcttccatgtaccatcgaggtcaatttgccataagtagaagtgtggtgaaacaggtggttcaactaaagtcttgatttctgcatcttgatccttattagtcttaacatctagcttaggatcaacatgtggcacagttgtaacatcaattgacttttgcgtatgaagttcacgctttttgccgtctttaccaacacgatcataatcgtacaaacggtaagtaacatcacttgattgctgagtctcaataactaaacagcctttagtcaaagcgtggatagtacctgcaggtacgtagaaaaagtcgccagctttaactggaacctttctaagtaatttgtcccattcgcccttatgaatcatttcagccaattcttcacgatttttagcatggtgaccataaataatgtaagcacctggatcagcttgcatgacgtaccaactttcggttttaccagaatcattttctaccttacgggcataatcatcatctgggtgaacttgaactgaaagattatcattagcatctaagaattttactaataacggaaattctttagccttaggattaccaaaaagttcaggatgctttaagtaaacatctcttaaagacatccccttgagtggaccctctgttacaatagaagcatcgtccttgtagccggaaatgatccaagcctcaccgacttttccatctggaatatcataattgaaaatatcttttaatttacgtccgccccaaatttttggtctaaaatacgggatcaaaaataatggttccatttaaaatcacctcatttttactttagctcatttaaaatcatctagaaaggtatggcttttctttcttttgaagaaaaaagatacacttacgaccacatatttcaagttggtttggatctataaaaagatataaattttataatatcagtcggttataaccaattaattatttatgtaattaggatcttatttcgtgaaaccgtaaaatagtttgtgtaaggatgaatgattccttaaatttatttctttaaacattagaaaaaggagttcctttctcgtatgattggtttgaacaaaaaaacacatacagaaagaagaactccttcatgaatgattttaccaaagattttgctcaagctctattcaatccagacaaaataaatgatttattgcgcaaagagctacaacaggctgttaataacttgttagaagctgaattgactacctttctgggctatgatccctatgccagaaatggctggaatactggcaattctagaaatggtgcttatttccgcaaggttgatacccagtttgggccaattgaagtgcaagtgcctcgagaccgcaatggacagtttcatcagcacacgctgcctgactacaagcggcactcggatatcttggaaagcatgattatcaagctatattccaaaggcgtaaccaccagagaaatagccgacttgagtgaaaagatgtatggcagtcattatagtccagcccaagtatcaaatatttccaagcagatgttccccaaggttgaggcttatcacaagcgcaagctaagcgacaagtttttctgtgtctatttggatgcgacataccttcctttgcgccgagaaacgtttgagcgtgaagcagtatatattgccattggcattaaacctaatggacataaagaagtcattgactactgcattgcgcttagtgagaacattgaagtctggacagagatgcttcaaaacatgaggttcagaggcttgatggaaattgagtccgatctgctggtcttctataattatcccaaacaaatcagagcttcaatttattcaaccagcatgattaaatcctttaacaacgtcatcaagcgtaaagctaagcctaaagcagagtttccaactgaacagtcgcttgatgcatttattggtatccaggcaatgagctacaatgaccgctatttcaaccgaattcataaaggctttggtcaggttcaggataccttagaatcctattttgattaaataaataattaaaaaatcaatttgcgagaaagaactatttacacaaaagatttgacagtttcataaattatctatcactagttactacttataagactaacatcttacttaatcaaactttaaacaaaaaaataagaggtgaactacaacatcgtcacgttatagttcatctcctactttaagttgtttgacaaagagtcacattagctagtctctgtctcttactacatacattaatagttaagaagtggaaattaattaccaaagcacctctatttcaatgaacctgggaatctaaattcatatgaactaatcgggcctactatatcaagactagttatttgtttgactaattcttgaaataaaattattgcgttattaacaccataattgtttactattttttggattttttctggacttttaactttttttggattctcaatatcataaaaataatccactttaatatttaaagtcctatattcagaatcattatcattttcttcatttgagcaattggcatgccccgataatgtcacaattgcatcgtttgcagaaatagccacagaaatatcatcaaacataaattccaaatagaaactgtcttgttgctgttctagttcacctttgtattcataattaagtttattaattataaatccattatatttaagctgtactgacatcgttatctcctatttctttaccatttgtggttgaaaaactgatttttttattcccacctgatagaaagacagtgtcttttgtttattagagctttcgtttatcttcatctttgctattactttagaagttttatgctgtaatgttttattatctatttcttttatttttattcgttttcttgaaaaactagataacttatttaaaacttgctgatatttttcttcactactttctaaatcaatttcctgctcaacttctgtatacgtgcttaaactcaaacccgttaattttgctgcttcatctctatttaaattcaaactaattctttttccgaaaatcttttgtgataactggaattgatatgaatttaatctactattatttggattgattttattgaacttcatgtctttcgtttctccttcctataaaattcttttccctattattcaccaattgattatgaattagttcagccagtttcccaagttgatcagtaagtaaattcatttttcttatttttctttgatctttagtaggaaatttagtaaatccatatgtccagacaaaatatactttactctcatttaatgtaaataaaattctacagtttttccttacgccttcatttgtttcagaaagaaagcgaatctcatatacatgattttgtgacatcaattttttaacaatctcgtacttgatatatctgttagaatttggaactttatactcatccttaaaagaatatccaataataatcccttcttttacttcgggctttaattgttcaatattaccactactatctaaagtaacatttgaaagaaagttgataattcttaacaccgattcttgaatattaggattaagattatattcatcttctaaatattcttcggctaatttttgctcagacaagttatcatttatcaaatagaactggcgcatgggtcactctcctttgtctaaacattttacgtcaaaatcatgatattttccattctttgttgaactacagtaagtgttaatgtttttgcgatagactatcagccatagtctaaccttattctttagcttcatcaattatatcagcatccccaacctcagcacaaaagaaaaccgactccataatattccctgtcaatagctttttattccatcaaaaaaggaggacatagttctctttgataaaaaatctattccactaaatattttataaataaaggtgatttctatgtcctctcttaatcattgtattaaatcgagcttgacattaaagatgaaaatatcgtttttaaagcttgtttgaattaacaaacaataatgtcttaaaagataccacgccaaaataaaagcgaccttcgttcataagagcaaagaccgcaaacttgttaattgtctcaccacagaaattaacactcaaattctaaccttacattgcactaaaaatcaatacaactctacgccttctcaagcaaactatggtcaatcggttcgcccttcaaatgcgcgccgcgaatcgttttcgcaatcattgacttgcgcttgctcttcttatcgtaaacccagtcgccttgagctgtggcgatattctcaactttggtagtatcaccatcaattcttactaagaatgctggtgccattgttgagcgcttgttaggacctgaagcaaaaccacggttggtcatgtatgaagttactaatacttctttcttgtttcctttaattggaacagcatagtatgaataagttgaagttctccagttaaatggaacactagctaccaagacagctgcgtcgccattaagtggtttataaccataagttaagtggtctgaaacccagccgagcatggcaacattgtcaccgactttggcatctgcttgctgccacaaatcatcaccagtaccacggttcaagcgagttgtagcaaataaatggtacttgccgttcattggaataatgtttggacgttcaatttcatcagataccatcaagctgttaactaatgatggcaaaacttcagcaactttaggattattctcattcttggtaaggcgaatgataccaatagtagcgttagcccatgttgcacgactcctcatgtcgtcattagcagtcacctttaagaagttttgcaaagcttccttgggtgtaccaccataatttttccaattatagacctgattttctccttggtaattattactaccagttgaagcttcaaaaatcaggtaacgctgaccaccaacagaaatcacatgcgcatcacgcatagcaacgttatctgcacctttgttggtagacttccattgcttgtatgtctgatagtgataaccatcaccttcgaataaaacatggcggtgacttctcttagctatcgaaattgtgtttttcttcttgttaaccttcagcttcaagttaactgttgcaatcttttggtgattagtattttcacgggtgtctacatcagcgtagaacaattgaatactgccatctttgtttaccgtagctgagcctgaccattcttgatcagttggcttagcattaaaaccaaagattggaccagcacatttccaatggttaagattattgtcattgtacttgttatagagcaaataaatgtgggcatcattttgctgaggaatccccatcatggcgatcattaattgatagcctttatagttaacaactctaccagtcttagcatcttgtactggccatgaatcccaaatttctagttccgctacttgaccagtttgtgcatcacgcgtaacggttgccggcatgtttttaatctttttagcattaaaatatggtacgcgatattgcgcatcttgatcaatcatctttttagccacgccagcatattgatcatagctccagtgagtactagtatccttatcaagctcattaaagttcaactttcttacttccttaagttggacttcagttaaatccttaggattaacatctgcagcttgtaatatttgaacagtttgaggatctaacttgtaaactgctgcgtcgttattttggctataactagtattattaaaaccattagaaacattatcactagtagattgagtagtgtccacccctacttggttttgagcattctgatcagtattagtagtatctgcaacaccagtgttgttttgattatttgtattattggtggtgtttgccccagtattattttgcgttgtttgatcttggtcctgatcagtagctacatcattattttggttagtttgtgcttgattttgatctgatttatcgttttgatcattagtggttgcagcttgagtatttctctgaccaactgcaggttgctctactgtatcagctttaactgttaagctgttatttatattaaacaagccaagtaaaacagctgctgatgcaaaggtaactaatgtgcttctcttgttcatctctgttcaatttcccttctgttattccatagccagtttattataatatcttgttcggatttttggaaccttcttaatcaaattgaaatattagctgtgattagcaaaattagatttagaattgaaatgctgtactaaatattaaaaaggttctgcttatttatgctgacaagtacaatttattgttgaattgtagctatataaaaagtctggtagctattgccatatccatctttcccttaatcgtatgcatcccattacagccaaaactcatattcctcaggaaaatgcatactatttaaaatattcgacatagtatcagggttaaattgctccttaccatctcttagtaactgtttaatagcatttgctatctcaacatattctgcctgatctaacaccagtctaagacttaatataagttcaaatacaccaggttgactattaagccttaaatcgtattggcccaagatatttctaacagaactcaaatttggtccccgatttattactttagaataagttatttcgttatgtgcaacagcatttctaaacatattcgtaacatggtttatatgttcaataacttccggcgtaatagcattactctgggataagtcattagtttttctatactttaaagtgaaatcacgtgctattttctgccttaattcatccttgcagttaatgtagaaataatttaaatctccaaaagtcataaattccgttacaacccataatggtatacaagtatgagaatcaatataatgctttatcgcatttcttcctcttttatgcgcttcttgctctatttttgttgttagtgagctgattgtttttaaaactctaacagtattatcactatcgtgcttaaaattattaatatccaaataagaatattctacaggaaacatttctgaaaacctataagccaactctgaatttaatgtagtttcataagaaagaagaccattgtataaaatggctctcaactttttatcaaactggtataaagagactatatcttcaattttcgttccattaatatactgatgcggattaattatattacctcggtcattttttcttaaaaagagacctttgtaaccattaattaaagtataatagcctattttacttaatacatttttagcatagtcgtcattttcaattaacattcctttttgtcggagaatgtctatttgctgatccaaatttttaaaaggcctactcgttagttccaatattaactcctaaaaaaacaaaaccttgataataacatccaatgtgaatattatatcaaggtttcgtttagtttagaaccttctcctagtgcctctaaacttgatctgtcttaagtattattatacgtagttacaaatatgtttgcaactaattagataactttgtaatcctttctattcctacacgttttcttaaactaagcattaaactttgtttgtaacaaattataaatagttgcgctttcaacctttagtaaataaatatcaatctcaatttatacaaaattctgacataaccaatcaattactttttgaatctattttacgattgtaatcatcaatagcctttatagtcttagtaatcgtttccgatccaattgattgatataattttttatcaccaataataaagaaccatacttttgctcttgtagctgcaacatttatgatatttggctcacttaccgcccaattagcagcacccttttctttatcagaagcacctagaacaagaaaaacaactttattctctttcccctgaaaagtatgaactgttccaacatttgatggcttaccattttcatatttaataaagttaatatcctttagttctttagtcaactgataagcaacattcttaaaaggagtgatgacaaaaatatcatccattgtaaatggattattcgagttgtttacaattttttgaatcaagcgttttaacattcgtgcttgttcttctacaaatttattttgagatacgccttttacatcaatccaatttcctgctccaatttttccttgtttcttttctaatttaccccctttagcttctttttccttaacattacttggtaaaaccattttattattataagaaattgtattagctatattaaacattggatttaaacagcgtctatgtacccaaagcggaatgccaatccaattttgatgttctttgtctttataataaccgtactgactagcctgacccataatcgcttgaaccgatgtatctccagaaacgtatttttcacctactttgaaaattcgatcaccaataagtgaaatcactttagaatctaaagtattgacaggcttaatttgagcgggatctcctactgccataattttttggctacgtagaagtggacctactactgattggggaactgcttgtcccgcttcatcaataaataaattagccacagaattagcaggtaagtttttaaacatccgatgaaaacttgcaaatgtagtgctaataattggaactgcaaaattaatccattgccaagaatatagcgttaattgctgttgattttcttttacctttttatcttgattattccaattaactatcgccattattagtgatttgctattttcataaagaaattgttttcttactcgcaacgccaatacaaacagcttagattcttctcgtaaatcattcgaggtataccaatatgtttcttcctcaaattgatcataaacatccctatttgaaaaatcacgttgatagtttggaaccattgcttcctttagcttttcatcatttaatattcgagcataagtatgtgattcaacttgcaattgatctattttattttccaacttatgcttctcagcatttttctcctctatcacacgttttaattttgataatttttcattctttttccttttttgggttatcttttctttattaaaaaatctatctctaaatctaacattttccattgatgaagcaatttcttgatactcttctttcttagaattaatctcttctgttacttcttggagaactggcgttaatttagaaaaaagaatatcgccatttgctacagtcgttatcttatactcttgaactttttcacgccatttttgtaattgccctaaagaattcgcataatcttgcaattgatttctcctattttcaacaagattatattgttttataaaatcatcataagcatcggtgtctgattgataattttcatcttgcaactttttaaccatttgtcctagcttatcgataatattattcatattttccttacgaccaccttcaagcgaaaaaagtccccaatactttggcttattcaaattggcgttagcgatatcatcaaagtaatgaacattcaatagttcatcaataacttctttaaagacatctttgtcaggaatttgcggtaattcgtctacaatattttgaacagcaccattattagaagaagttacgactatatttttattagagatttggtcgggtaatttcgtttgccccaccttactatctccaggtaaataaacatttttcttatcaagatcacaaatttcttttgcttgtctaactatcaactcagcaaagatatcttttaataaagtagtttttcctgtgccaggagggccattaacagttctgatatcattcttatcatttatagccaagttaattgccacttgttgcattaaagatgctggaaattttgacaaaaaatgccccattggataatttttaggttgtaatattttatcaaatatatcaatattcttcgtcggatcaagattaatccgttgatctggatttaaaccattcaagtaacgttcaagatgatcggacttttccttttttgcccagttcaaatcatcaataaaaaatgaatgtaaattaatatcatctgaatcaatctttttaacgattgaccaatagctcgtctttttgctaattttatatcgttttactaatttcttaaaagcttcattaaattgaagttcaaaacttttttcatctaaatcattttcttgaaagccaaaaagttcatttatgtcatttttcacctgatcttcaaactttttgaacttatctgaatcatcaattaattcttttttattaagcacataactactcattgtaacaaaagtttggtcttctaataagtgtaagtttttattaaatgcaatagaaactccaaatttagtttgcttattattaacttcgtcttgtaaattttttaaatgatatttgtgaacaattatatctataacttgttgaaacctaaaggtatcaatgtagaagatcaatcctgaatttgagctttttttggttaaactacctttatatttacggttaatcatccaacgaaagtattcataatagccatgtccctcagcctttgttggatcaaattgcttagctgcatttctatccccacgtttagtatttacgtcaccctcagatagttgttccattaaaatccatgaatttaatatattcttctttatttccatctttttacctattatttttatatcaacctatcaacaactacttaaacttctcacacaaaattgtctattttcctgtgatctgcataattttgcaaatataaggacgcatccccatttcatttctatgatagacaatgctagctaaaatccaaaatatttttcatgccagcaaagtacagatgataaaatttacagctccttttatcattcgctttttttcaaaagaaaaatatagaatgcaaaacttaaaatgattaatataattatccacgtagatggaaaagatgtatttgcaaatattcccagcaaaaatgcaatcataatattggctaatacgtcttttaaaaagctataccaccattttgatttagaaacttgatttgtattggcttcaaattcatattttataagcgcaaccacaaaaaacataccaaaaataaacagcatcacaattaatatgttcagcgttaagttactactaatccaatttattaatgtgcctataaaaaacaagttatagatatcatagtaattattcgctacttttgtgtacttctctaaatttttatttttgcgatacatataacaagcaaaaattacatccaatattacaaacaatatcgataagaaagcaaaaaacataaatttatatgttattacttaaacttcccacacgcaaaattgcttgtttcattgtgattctgcgtgttttgacaaatataaaaggcacaagtccttttcattgctataattatattgaccaaaacataatttatttgcatgaaaggcttgtgccaatgtctattttaccatctcctgaccaacaaaatgaacaactattttcaaactcaatcatcagcttcatcaagaagtttcaggtgatcaagctgttgagaaaatgtggcttccgcaaggaaaaaggcattagcctgttcagcttgtttctttacgttttaagcaatgtctttcgtgaccgcagcttatatatgcagctgaaaatggatcattttcaagaaaatttttccaagaactcatattaccgttttatgcgcaacgttcacgtcaattggctccacttcaccacacttctgtctgcgcaaatcattaataaccacttgcgatctttgacttcagaaaaacgggctgattgctttgttgtcgatgattcctacttctctaggaccggcttcaagaaaacagaattagtcgccaaagtttttgaccatgtatcaatgacttacaagaaaggttttcgcatgatgaccctgggctggactgatggagcttctttcatgccaatcaattcagtgctgctgtcttctcagaagctacagaatatgattggcgaaaataaagtttttgatcagcgcaccattgctggccaaagacgtatgcttgcccggactaaaggcacagacgtgatggttaatttaatcgaccaagctatgaaagcaggtcatcaagccaagtacgtgctgtttgacagctggttctcaaatccacatcaaatcgtccagctcaagcaaaggaagctggatgtgattgccatggttaaggttagctccaaaatcaaatatgaatttgagggagaacgcaaaaacatcaaacagatttatcgcagctgtaaaaagcgatgcggccgttctcgctacctgctgtcaatcccagtcaaagtcggacgccaggacaaagacggtgctaaaatagatgcacggattgtctgcgttagaaaccgtgccaatcgcaaggattggctggcaatcatttgtaccgacatgtcgcttagcgaagatgaaattatccgcaactacggcaagcgttgggatattgaggtttttttcaaaacttgcaaaagttatctaaaactaagtacggaatatcatggcctgtcttacgatgctttgaccgctcatgttgccatagtttttactcgctacatgcttatgtcagttgccaagcgggacgatgaagatgaacgcacgctaggcgagctgttctattgcatgattgatgagctggcggacattacttttagccattccttgcaattgattactgatgcaatgctggccagcgtaaagcaagtctttcatgccagtgaagcacaaatagctgaattcacggctgactttatcaatcgtttacccaaatacatgcaaaaattgttaaagaaaactagcaaaaataatatagaagcctaaagccaagcaagatcaagagattactggcttatttagtgtgggaagtttaagttactactgtatcaagctttgttaatttctctttatctattccttaatcgttttcagttgatcaatcaggtagaccaatgtatcaataaacttgatgtcaggcaaagaatcattcattaaatagaataagtcttcatcattgttttgtctttcctgccaagccagaagatcataagcaaccgctgtagtcgcaatatagccgcattagccgtcataattttaaatttgcaatttgattaaagctaaaaattgtttggcagtcttaaagtagattttaatttaccatctgcgaacgtaaagctgaataatttaactagggggactaacttacctgcgcttaataatgcctaagccacaagtcctaattgcttaaggtgatttttggtaacgaaaactaggaatcaaacaaaacatatttggcgagaatgcctagactgattgcttgtctaattaactctacaatattcatttgtcggcggctttggcccttcttttgccagcatggaacagtgaatgacgagaaaaacacaggggtcttgctttttttattatagacaaaaaaagcaaggaactacgcgggaaaggcatgatttctagctttcagcctttaattaaataaaaaatctatttatgatatacacaaactgttctacagtctcaagaattgttattatcatttatttcctttacaatacctgatttgtcaaacaactcataaaattccttaatgttttttttagtttgataaatatttctaaccgtttgtcttcctcgacaaaaagtaaagtacagcttttctttagcacgtgaaattgccacaaaaaatgctttacgatcagactcagattggtttgagaaactccaaaaagcactatcttctaatccaataaagtaaacagaattatattctagtcccttactcttatgtatagttaaagttgctattgaattctttcctaaataattgtcaattatttctttccatatttctttgatgtcagtatttaactcatttattgatccgcattctttaagctgctctataaattgagttttcgttctatttaattgatctatttctaagtattctggatagtaaacttgaagcctattaatcgtaaaaaagtctattatagattctacgattttacagtaataattactttttgatctattctcatggacttgaaccaatagatttttaaatagcttatcaaggaatacatttaattttttgatatatttttgctctatttcagcatcagctaaattaatgagaaatatttcagaagtctcatctaccagttcttgccactcctgtccatttatcacgttaatagacgctaaaatcattttcaaaatcaacttaactataggttcagagaaagtttcagtatactttgattcaaccctaacagttacatttttagtttttaaatactcttttatatttcttatgtaatcttcagggcgttgttttactaatatagcaatttctgaaggcttaacacccatacgtatttcttttataatattttccccaacaatttcagcttcttttgagggttcgttagtttctattagaaaaactttcccttcatccttatttttattaattattatgtcagggtttatatccttatctattttttcatacataagtttttgtaatttcactatatttaaagctgatcgatgattttcttttaaaaatacctttgttgctctaaattcacgcgtatactttccaaaaatttctttatccgcaccagcccataacattatttgctgcttattatcccctacagccgtaattttactttcactatttaaaaaacattcacggaaaatatcatattgcaaaactgtagtatcctgaaattcatccagaaacacaaaaggaaaagctgatcgaataatatgtcttacatatttattatgctggataatatataatgctagtctagaaatcatttcaaaagtcaaatacgttttttcttctcccattaacatatacttccaaaatttataattattactctgagggtttatatcattcaaatctactttcaaaagatcatttacagcgtttctatcaggaacatagccgaaggcatgttcgtatatttttgtttgagttgaattagaggagatttcatactgaggtctaggtcgtaaatctttcggcaatactaaataaaatctgtccactattaatttagcaaaagcatcaaaagtttttgaaataaatctacttccctcttctttaccaactctttttgaaactctatctttaatattctcagcagcatcacgcttaaagcttattgctaaaatattaaaaggagcaggacataatcctgtttgaaataaatatgatgctttctgtgctaataattctgttttacctgctcctgggcctgcttgaaccaaaatattatcatttgtaaaaatagcctgttttgcatttgattctaaaactatcccattactaggtttccattgatccttattcatcatttttcttatccaatttattctttacagactcaagtaatctttttaattgttcaggtaaattattgcatagctcttcttcagatatatcttccaaagcagtaaaatgtactaatggttttcctattcctaagaaaagcatattataccatctcattaattctatatcatttttatcataatcaacttcttcctctctttttccttttaaagttctatccaaaatttttttgcgttcatccgctttggtctttggacttcctgatgctattcctttatatttatccagaaaagctgctaacatcataaaatccaaatctaaaggaaaggaaaagaaaacatcatacttttctagttgtttcgtcaaatccaacaaattatttttattttctgctaaatcggcgcatttgttttctattttttctaattcgtcatcattaggattaaatcgcttcaactcatcaataatatctttaattcttttctttccgcctaaatatctcccataatcaagatctaacaaagttatatgtgctatatttaagctttctaataaatcccacaaataattaaccattcgtccagctaaaggtacaattgatatgtttgcttcatctaaaccagtatacgaactaattattttcgataaaactatttcttcactctcgccttcacctaatattactaattttgaaaaatacaattctgggtaagtttgaaccgctcttttaataaatttatatttttctcctttgtcatcaggcaattttattttcttcacttctgtcacggcatcttttgtcaaatgaaaatagcgtacattctctggcaatactctttttattattgctggagaatgagaggtgattatagtttgtgtattatctaatttagttatgcttttaactttatccattacttttccaagtaaatgaggagaaatatgattttctggctcttctaatgcaaatattgttacaacaggatattcaatttttatatcatcctcttgtaccgtattttctattgctaaaacacttgcaatattagaaatataaaacaatgattttattccgtcactcatttcatccacagaaaatacattattagttacatttgaattaaattcaaaccgtatacgactcataatcttattgatatctatgctagatacactagcttttacattagaaaatctagaattaggttctagacttttccattcttgatttaaagtatcttgtattaatttacttcctttttcgtcccaaaatgtatcatttaattgtgatgaaatgcttactatcttttgtttaatttcatcatcccaattaactctttttatcaattgagaaatcattccatctgaggtattacttaattgtcgttcaggatttctaactgcaggtacataaatgaactgtatactgcttaactctgatcttctagctactatcttattttcttcattattatcttctagagaagtcatgaagtaaatatttgtatctactgttccatcagcaattcctgaattcgtccaagtagattcaagtctaattcgtaaaagcggcttatcttgtccgttttttatgattagccgattccaatactgtgcttcacacttcttatcttcgtctttattagctttatctaactcaaaaacagcttcaatatataggtccctcgattgactatcttgatttgctgaatttatataaaaatctgattcatgtattattctatccgatgcattatatgagaataatttattaagtgcaagaagacaggctgttttccctgaaccatttgtaccaataaatgctgtttcttttgaaaaatcaattttcgtttcttcattgaacgatttaaatcccttaattagtaatgtctttagtctcaatctaatccccctcatctataatatatcgttattcaaatacacttaactaatgccactattcttaattttactctttttatcaaaaatcattatttaaatattcaaaaaattttatttccggatttaaaattgaagtgcaacaccaagtgttaaacaaaaaggccacgaagacctaaacttgaagtgacgaaaaatcaagaaaggaagatcttcatgaccaactcaaattctagcatttctaagcactatcatcaattaaatatcgtacagcgttggtgaattcaaacaatattgatgtctatgaagctcaaaagacgcaggaacaagcgtcatcacaaccacgacggtcacgctttgcacaaaaagcatcttggcaattccattgaacagcgtcctaggagattgcaaacagaaaagctccgctgcactgggaaggagatctggttaaaggcgtcagacgcaagaatcagcctgctttaatgactttgactgaaagaaccacatgctttaagtagttatcaagattcctgactatcgggcaagcacatgccaaaggctgccagatgatctattttgctcacccatattctccatgggaaaggggcaccaatgagaactgcaatggtcttttgcgtcaattcttccctaaatgcaaaagtatgaaagacaagtcagctgcttatgttcatgccattaaccacaaacatatccaaatcttccaatatcagacagcagaagaaatcttcaagcaatatgtttcttcatagcctaactgttgcacttaatttgacaattcaacactttcaacctttagctatatcaatctaatctattccaaattagattatcagtaagcggaatagactggagtcttatttgttcatcaaagtttttacattcttttcttaaaataagtactggtctaacatcatttaaaaatttcaaatttccttcatttatcttattatgaaattctcggtttagctcaaacttacttattacgtgattttcaatatccttcatttcatttattggcaatttcttacttaatttataaagatctaaatagtaaataaagtctgctttaatttcatcattccatttttttacatttgttgctggaaatataatattagacaaaaaaattctatatgaattatcatactgtgctttattttcaaaatattcaaaatttttatttgcatgttttaaatacaaattagttctcatacgatcattttcatataaaaaatattttatactatgtggattagaaaatatcttgcattcagtaatcgcataggcttgatcatcatctataagaattatatcaatttctttttttcctgatttatcacttattgtatttttctttttttctatactatatccagactgttttaaaaattctattacataatcttcaaaccaatgccctttcttattactccatttattagtattttccataagtcttgtaactaaatatactggatccacacaataacaagttggtaaatagacaatattgccaaatataaacggagcatccattatatctctatgatacgtcaacttttttgtgattttaccgaaactgtcaaatcttttgtgtaaatagatctttctcgtaaattgattttttaattatttatttaatcaaagtaggattctaaggtgtcctgaacctgaccaaagcctttatgaattcgattgaaataacggtcattgtagctcattgcctgaatgccaataaaagcatcaagcgactgttcagttggaaactctgccttaggcttagctttgcgcttgatcacattgttaaatgattcaatcatgttagtcgaataaattgaagctctgatctgcttgggatagttataaaagaccagcagatctggttctatgtctttcaagcttctgataacatggctgtaaaccttgccccatttggtatagaagtcatgcaggacagctgtggcttcttctttgtttgtctgttgatgcacctgtttgaattcgttcatgatcttttcacgatcgtcgacgcgtactttagcgcagatattgcgcatgacatgaaccaaacagcgttgaaaatgagctttaggataagtcctggccaaggctgttttcatgccaacaacaccatcagaaagaaaaagctcaacttgctttaagcctcgggatttcatgttttgaagcatatctgtccagacttcaatgttctcgctaggtgcaatgcagtagtcaatgacctccttgtgcccattaggcttgatgccaatggcaatatagactgcttcacgctcaaatgtttctcggcgcaaaggaaggtatgtcgcatccaaatagacgcagaaaaacttgtcgcttagcttgcgtttgtggtaagcctcaacctttggaatcatctgcttggaaatatttgatacctgggctggactgtaatggctgccatacatcttttcaattagatcggctatttccctggtggtcacgcccttggagtaaagcttgataatcatgctttccaagatatccgagtgctgcttgtagtcaggcagcgtgtgatgatgaaattgaccgttgcgatcccgaggcacttgcacttcaattgggccaaattgcgtatgaactttgcggaaataagcaccatttctagagttgccagtattccagccatttctggcatagggatcatagcccagaaaggcagtcaattcagcttctaacaagttattaacagcctgttgtagctctttgcgcaataaatcatttattttgtctggattgaatagagcttgagcaaaatctttggtaaaatcattcatgaaggagttcttctttctgtatgtgtttttttgttcaaaccaatcatacgagaaaggaactcctttttctaatgtttaaagaaataaatttaaggaatcattcatccttacacaaaatattttacggtctcattttaccaatatcattcaaataattattaggtataggttttaaatgattattaattatttttatataacgatcgggtaagtcaaaaaaatttcttggaacatttcctgatattaagtaatctacctttaaaaacaatttatttttctttaaagaaaaaaacacttctgctataatttcacaattatattgaattatatttaaaacatccaaccattctattattgggataccatataaagtttctgcacctaatttttcataatcttcacgattctccttattatcaggtaaggatggtaatttataaaataaattttctgcaattccttttaattggtataagccccatctacatggattctttttatctatagaataaatatatttactatttaattgtctaagatccgaattttcatttctatttacaatataagtagcacatatatcgtttacagaatcaacaatatatttctttccatgtcttataattctagcatttccatatttccaaaactctattatgttgtaaaacatgtctatatttcgatcataattcgtcgaatttaaggcttcaagatcatttatagaatttacattttttaaattagatgcaagacgtctagaaaaagaaccgcagtttatttccatcttttcattcaaagtttgtttactattttgattatggaaagcatttattacttgatcaaaattagtaccataatccaaagtctttgattcaattatttctttctttatattcttaaggctctctaaatcctttaaaatcatagatgccttattttttattcttggacaatagtctccaactatgatttgtttcacaacttcaagatacttgtctctagtatttgaccaattaccataatcatcaattatcaaattcgatgatttaatgatatctaaaattctagtaagttttgaaaaatctttcttacgtaaattgcaataataaattgaacacttaagctgcttgatagatatgatccaattctctttcaaagatttcatctggtgtatgatatgccaatatttttcttggtagcgaattgcaccaggtttcaatgtcaatgatttcctgaagagaatagttattgatgtaatcacccttaggaatgaatctgcgaataaggccattgtgtctttcaacagtgcctttatcgcaagaagtatatggatgggcgtaatagactaaggtattagatacttcctctagattggaaagatccgcaaactctgaaccattgtcagttgtaattgtcttgaagatttcattccagtgctcactatactgtttatgtagagtttgaaaagcgctcataacactggcagctgtcttgtctggaatacgcaagattagaaactcacggctcattcgctcagacaaagttagcagtacttgatcatctctagtcttatgtcctaagactaggtcgcattcccagtgaccaaactcttttcgatcattaatctctttagggcgttcttcaatgtttcgacctaatttcttcttgttcttatgaacacgatgaattttagtattacgctttaacttctcaggcaaatcagagtttttgatagccaacaagccttgatctacatagttatatagagttctagggcagactatctggtcgctgctaaattcacccacagccaagcagcgattggcacatacatcaagtgaccaattgtcttcaaagaaatgcttattgacatacttgataaagtcagatttcttcaagaagtctggtttgcgaccacagtggcgtcggttagtctgataaacactttgaccatgatcagccttgtaacgcttctgtttgccacgataaagaggaacagtgcctcgtctaacttcgtaactgattgtagaaggcgaacagcacagctcacgagcgatagctctgatagagcagccatccttcaagcgagtttgaataataacccgttgttcaaatgataaatgctttcccttttgatgctcaggcatgatagaatgtaaagagtccatttgtgacctcgtttctgaatgttttgtggtaattacattttatcaaacaggtccaaatggactttttatttttctaaagtgttcaatttgattttataatcggcgaaaatctttcttatctaaattcaagtatttaatgacctcattataaaattgttcattgtttctattaacatcttctaaagcacaaatagacggtctcttcatagaaactttatgctcttctttcttcgacttctttgacattttgtatcctcacttttcagcgtttaatcacaattcgtttaaaataatgattaccatcagaatctctaaaaacaggtgaaacgattagttcatttttatcattaccaaacttttttatttcttttgccccctctattatagattcagcctcaaaattatattcattaccaaaacaatgtggcataattaactcggcaaatggtatcattttgtaaccattagaatattgaggacaaaatatctttttttcataaccatcttgtctatcttgaatacagtcaatattcttccataagcaaaagccaactaattcagcactttcttcattatttccattgcataatgcacgcaccttaaaactatcctctttattcacttgtattgtgtcacttagatattgaactttattacctgtaactcttatttcaagtacttgttcttcggatatattctttattccaaacgctatcaaaccactaataattccaactacagcaaataaattttttcctagttgatataaaatcaatggattactcatgaccacaggtatataaataagctgtatagctaaacttactaaaacactaatttgccacaacccaataggatacttattcgccaaaacactagttttgacgtttaaactactaaaatatactatgaagagagttacaattaaaaatactattatccatgtaaggtagtctatccaaagattcttacttatgaacatcaatattaataacataatatttactaatccaaacgtagtacacgatgaaattaaaagtgaaatcagaaattgtcttgatttcactttttttagtgtcaacttattttttttcatttgtattgtcaccttctaatcaatctcgctagtcttcaaacgtacaatactactcctaaacttatctaaatcgattcctaaaatttgagacagaatttcatttggaaatacaataccatacatttcacgtagtttatcattaagatccttagggtgaacaacatcatgctcttctagtaattcaaatgcttgatttagagccttaggtttcgacatgattttctcatcatccattatttctttagtacgccagcctctatagcttatctgtttttgtagcttgatatattctttatcatcaatcaactgaagatcatgagcccgatgaaccattgcagctattgatacattccacttagacttaagatttataaatgtatctatattaataaatccatttttagttaaatcagattcaaagctttcctttggcattaagaatgctgacgcaaattgattagcttcattttcgatagttctatagtcttgtcccagtaaatcttcttgaggataatagagttttgcatgcattgcatagtgacctagttcatgtgctaaagtaaattgatccctgaagaaattctgcttttttccattcactaatactatgtagtattgcttttcacctatttcaacataaccgcttctagcatcaatcttattagaattaaaatcaacattaacaattatcaaaccatgacgttccattaaatccacaatatcgctaattggttgatcatccagattccatattcttcttaattcattagcagcattttcaggtgattcttccaactcaagcttcgtatctaattcaggaaaatctatataattttcaaaataatctcttagatatgccgctgcttttttataagttttactaggctgtttttcagattgagtagctgtcaatctgctacgataaaaagtaccatcatcttggtatggtactttctcgaagtctgtaaagaaatataatgggaaatttagtacttgaactattttttgaaaaacagctgaactaatttcaattttgttgtgctcgtatttcgatattgcttgtttagaaacaccgatttgatcagccaaagcactcatagttaaatgattaaataaacgcgcttctttaagccgttttccattaatttgaagtgacattattattctcctcactcgttgtcggcctcttagccttattagcattccatttgacaatactatcagacttattaccttccacattattcttttgattatcatatctagttgtatcatcatcaggactaggagatttatactctggaattactatctcatctatgacattgaaattgttatcaactaaaatttccaagccattaacagcttcatcatcaaaataatcataggtaattataatggttctttttaatttagtaaaatcattacctaaaattttctttgcttcttttaatctcttttctgctactactttattatttccaatcccctctaatgacaattgctcagcagaagcgacattattaattgttaaaggatacatatagtgagtatatttaccattttgaatcttacgttgaacgactagaaaatttgtatatgaagtaactaaatataaagtaccatctttgacattaaaaacacctattgccttccaaatatgccggtcaattgaaatctcgactaaccatggggtagaagcaatatcatcagaaatagtattaaatctgtggtcccaggtattaaaggataacccattaatatattctccccctgcttcttccatataatcatccctaacctgagatttagtaatggtcgcacctggaacgatctttcatagtacttcatcgtcagctttaaaaatattcatgtagtatttcctccataaaaaatatgctatctatttacgcttataatagacttatttactgcagttttcaactaatagttgacaaaattagtgcattttctaaaaagtgatataattatctttgataaaggaagaaggtgactatatgaagaaaactcaacacgttgttcacaaccataacggtggatgggatgtcaaagcttctggagcaaaacgagcaaccaagcactttgagactaaagcccctgctgtcgaatttggccgcaatattgcgaaaaaacaacatactgaattttttaatcatggaaaagatggaaaaattcaaagtcgtgatagttatggaaatgacccatttccaccaaaaggataggtgtctattaatgaatagtgatactaaattagtatttcagttgttagaaaaaaatgctagctcagagcgcccaaccaatattacatgtgacaccagcgacattctacaacaatctggtttgtctattgcaaattttaacaaggctattagtgagttaaacgagctaaatataattaatattactccaggaaataatattgttgctgatattgaattgcttcgaatcgattagcttagtaaatattaaatagaaaagtatcttctatcttgatgggatcagattaatactgaagtcatcattttaggagatattttttgttggaaaagacaaacagccaattattgttttaaaacgccgtcaaacccaacctcaagttcagtcggaaaaagctcacatgcacaatatcccttactcagccttaaaagaaattcaaattaatggttttactgtgaatcaccagaagcctatatgcatatcctgttggatagctattcaacaataaaacagggtacatagtaaagcactaatgatggtcaattagcaattttcacaaaattttgatagtgcccatccacaagaatatttttagcttaatcgaagctactaaacgatattgccttattagaactgacacaggaaaatcataatcaggaaaaaactgaccatcacttattaataactaaacatgacaacactattgcccgaaaaatcttatatcgaactattgggcaaatggagacagttaagtcagctcaaccttgtcatatacggattactatgaccataaaaaacagctttctgaagccagaggctacaagaaagctgctattgcgtctatgcataaactgatacggacaatctatgctctgattattaatgatcaaccatatgattaccataaagctctccgtaatcaaagataatgattaatcaatttataagtatatcagcctgcacaaaatgattaaagtggagactggttttgtcatgcactgaatttggtttcagactgactttgatcttattcgcactattcaaatttttctttaaatcattgataacacttgattttagatagaaaaaattagtttttaggattgggttgaataagtaaacatttaggaaattgtgattcgctataattaaaactaataatttttttctttgattttaaaattttgatttcaaaatttcccaaataatatagctcaaaatatgactgagaagaagtatgatctttttcccatcgatcagcatatcgtttcaaattatcaaacaaagttttacaacgagcgttttcaaaggtagtaggattaatgattacctgtggtttagcatttacaccgtttaaccaagcagctggaccagaataatttaaaattaaactttgactactgtcattattaaagtatctacaatatgcctgtccataatatatatgaactgctttatccaattgtgcttcctgcacctttttaaaaaacaaattaaaatcaatttgatttccatccgcatcgtacactttttgatttaaattatattctttataattatcccacagttcaacaatctctcttaattgatttgtatgatgcgcacgcttttgataattataattggaattttcattttttctattataattatcaacaattctagttggaatatctggatgattatttgaacttactgctattttttgtgtcggtttcaaatttgcaattaatccagttacttttgaaaaatcaaatattattttatcattttcaaaatagtaaatttgatttttagtgctatcctttcgatgctcagcaataaattgtaattttcttggacaatcaagtgaatgaaattgattgtgttttctatttgcataatatggtcttattttatctggatgattatcaaaatcaacaaataaattaatgcaactcagttcaactgaacattctttagcacagtaaaaaatagtattttcacaaatacgacggtaaccatatactttatttatgtcttctaaatatattttattcgcgtcagcagcagtaaccattccatcaggataattatcaggatctttctccattaatcttttacagaatgctttttcatattttggcataataatttctcttttcttttttaattatattataggatcatgcctcacatatggaataaaatttatagattttttaatatttattgtcgaccgaatttaagattgacgtgcaacaataagtgttaaacaaaaaagccatgacgacctaaaccaatgtcatcaagttaaaacattgaccataaaattgtacgtttttgagaccgtaaaatattttgtgtaaggatgaatgattccttaaatttatttctttaaacattagaaaaaggagttcctttctcgtatgattggtttgaacaaaaaaacacatacagaaagaagaactccttcatgaatgattttaccaaagattttgctcaagctctattcaatccagacaaaataaatgatttattgcgcaaagagctacaacaggctgttaataacttgttagaagctgaattgactgcctttctgggctatgatccctatgccagaaatggctggaatactggcaactctagaaatggtgcttatttccgcaaagttcatacgcaatttggcccaattgaagtgcaagtgcctcgggatcgcaacggtcaatttcatcagcacacgctgcctgactacaagcagcactcggatatcttggaaagcatgattatcaagctttactccaagggcgtgaccaccagggaaatagccgatctaattgaaaagatgtatggcagccattacagtccagctcaggtatcaaatatttccaagcagatgattccaaaggttgaggcttaccacaaacgcaagctaagcgacaagtttttctgcgtctatttggatgcgacataccttcctttgcgccgagaaacatttgagcgtgaagcagtctatattgccattggcatcaagcctaatgggcacaaggaggtcattgactactgcattgcgcctagcgagaacattgaagtctggacagatatgcttcaaaacatgaaatcccgaggcttaaagcaagttgagctttttctttctgatggtgttgttggcatgaaaacagccttagctcagacttatccaaaagctcattttcaacgctgtttggttcatgtcatgcgcaatatctgcgctaaagtacgcgtcgacgatcgtgaaaagatcatgaacgaattcaaacaggtgcatcaacagacaaacaaagaagaagccacagctgtcctgcatgacttctataccaaatggggcaaggtttacagccatgttatcagaagcttgaaagacatagaaccagatctgctggtcttttataactatcccaagcagatcagagcttcaatttattcgactaacatgattgaatcatttaacaatgtgatcaagcgcaaagctaagcctaaggcagagtttccaactgaacagtcgcttgatgcttttattggcattcaggcaatgagctacaatgaccgttatttcaatcgaattcataaaggctttggtcaggttcaggacaccttagaatcctactttgattaaataaataattaaaaaatcaatttacgagaaagatctatttacacaaaagatttgacagtttcatatcaccttgagtatcacatatcctttttaggtctttaatagcatcttcgtaatttcctaaaaaatattcggttaatccctttaaatacttaatattaaccttaaattcattataatcagctatttgttgccataattctaacgctaattcaaagttgttattttgcaaagcatatatgccatttattacatttgcgaaattctttaactttttaggaatatattctacctttttactggtattcttttcaaaaagtagccgtacacccttttctaaaatttgatattttggattattatcagctaatctagcacttactattaaagcatcactattattactatttacatccgcttttaatatccgcaattctcctacactagtgtcatttttatctataacagcattaatatccgcttttaatccatataaattatgagtaatatcaattgatactgaaagatcaacatattttttatgtttatctatagcatttaaaaaatctttttttgtaattattccttgtgtacttctacattttgcacatattcggagcaaactattttccaaatcgataaaattaatatcaataatttttaaattttgtaaacacgtggctaatgtgccaataatatatttttctttacttggctctggaacaactataaaatcacttttttctattttaagtaaatcctcatcctctatattttctatttttttcttaatccagatagataatcctgtatcattattttttcttcgatcatttaacccatctataaatcttctaagatcattatttgcatgacttaaataaatacaataattaggttcattagaaggcagcttatgcactacttcctttacctttccaatagcttcaacgtcagacttaacttgtcctgaaataaccctatttttatcttcattcaacactttaaaatcatttttgttttctggttgaactcctacaaaacctggtgtcatatagttttgtaaaaatgcatccaaagttgcatagtcctgatattcaaagcccttagaagcagttactccaccttgtcctttatttggcaatatccatctctcctttatagtatttttatgaaaccattattgttaatttcgacacaacttttttctgttaaaataaatatttgctattttttcattatacataatctttacgtccaaaagcatatcaaaaataccgactatagtttaaattctctcctaaatcccacttaacttcaatcaatctacgatgaggcaccccagaatttcatttagcctagcgcacattatgaagccaagttccttactctgttccaacaactcacgcaaatccttttcagtctttacataagatgcattttcactcaaagcaacaaaatcatcaacaattttcttcaccatctcttgtcactcttcctcattattcatcgccattagtcttccttttaaaaaatctgcttcaactcaggaatctcttcaagtaatctatcacacccattaaccatattctttactattcaatgattgcggtcaaccttactatgaccaaatgtctccaaaacaaaaagccagcatttgcgctggccatctttgattataaaaggttgttcttcaatattatgcaacactacgttactgttaacttaacttttgtgccaatttcaaaatatacttgcgcagatcttccttggtttcaggatggttcaagccatattcaatcgaggtttcgagataaccttccttgttaccaacatcatgccgcttttccttgaacacatgggcaaatcgtcttgttcaatgtatcaattgcatcagtcaactgaacttctccacctcgaccgggcttggtttcagccaaaatatcaaaaatttctggcgttaataaataacgaccaatgatcactagatcacttggtgctttatcaatagctggcttttcaacaaaattcttcacattataaagactgtcgttgaccttgccatctggcgcaatgacaccatactttgaaacttccttgtgtgagaccttcattacagcaatgtagaagcatgagtctgctcatagtcattcatcaactgcttagttaatgggattttatcatccatgcagatcgtcgcctagcattacaacaaatggctcgcctgccacgaaactttttgctcgataaattgcatctcccagaccagccggatggggttgacgagtatagtacaaatttactcccaagtcagtaataccttgagtcagctttagcaattctaactttccagttttttcaagatcttgctctaattctggatttgagtcaaagtggttttcaatgacacgcttattctttccagtaacgatcaaaatatcttcaatcccagattttttagcctcttcaacaataaattgaatggttagtttaacatacaccagatgaaatatttgagatcgaatctatcaagcagcctaagtgttcaattcattattgcaattttcaatttttaatctttactattcaatatttaatttacgtctttaattggtggtattacaaatctattattcatatatgatggcttaaaatctaatttcttaaatttagtatcctctcttgagatcatttctcccatttcattaccagatacattgctattatttccgttaacaaaataatattgtgcatcttcaaacatatcctcttcttttgctcctttactaaactcacagaatcctaattcaccagctgaggttaaaaattttatgatcatattagtcagttttatttttgagctataatcattaggtattataaataattgctcattagacgaaaagcccgaatacgaataagtatctattacattttcgccgcaactatcagtataagtcagttttattgccaaattataaacaacattaggcgatatattaataatttgtattttagaatacttacttccattatcttgtaaaactttttttactatttgcgtatcatgtttacatgctaaagtaacgatttctttgtagttttttatagttgatgcggatttaacatcaaatctaggacgtttttcttcaatatcatttgcctttttaattttattttgatttttaacctgtgcaaaacctgctatcaccgcagcaatagtaccgaagccacctatccattcagcaacactgcctaatacctctccattagcattaatcattgcacctatcaatattccgaatcctaagcaaaaaagtgatactaatatcccatacacatatctatcatctatatttttttccttcttttgcattatttcatattcatccttttctcttttcctaggcatttcaataaatatcggttttgaaaaaatgtttccctcagagtcattatatataacaagtaaactatattcattgccaactaattttacttttcgaaactgtcaaatcttttgtgtaaatagatctttctcgtaaattgattttttaattatttatttaatcaaagtaggattctaaggtgtcctgaacctgaccaaagcctttatgaattcgattgaaataacggtcattgtagctcattgcctgaatgccaataaaagcatcaagcgactgttcagttggaaactctgccttaggcttagctttgcgcttgatcacattgttaaatgattcaatcatgttagtcgaataaattgaagctctgatctgcttgggatagttataaaagaccagcagatctggttctatgtctttcaagcttctgataacatggctgtaaaccttgccccatttggtatagaagtcatgcaggacagctgtggcttcttctttgtttgtctgttgatgcacctgtttgaattcgttcatgatcttttcacgatcgtcgacgcgtactttagcgcagatattgcgcatgacatgaaccaaacagcgttgaaaatgagcttttggataagtctgagctaaggctgttttcatgccaacaacaccatcagaaagaaaaagctcaacttgctttaagcctcgggatttcatgttttgaagcatatctgtccagacttcaatgttctcgctaggcgcaatgcagtagtcaatgacctccttgtgcccattaggcttgatgccaatggcaatatagactgcttcacgctcaaatgtttctcggcgcaaaggaaggtatgtcgcatccaaatagacgcagaaaaacttgtcgcttagcttgcgtttgtggtaagcctcaacctttggaatcatctgcttggaaatatttgatacctgagctggactgtaatggctgccatacatcttttcaattagatcggctatttccctggtggtcacgcccttggagtaaagcttgataatcatgctttccaagatatccgagtgctgcttgtagtcaggcagcgtgtgctgatgaaattgaccgttgcgatcccgaggcacttgcacttcaattgggccaaattgcgtatcaactttgcggaaataagcaccatttctagagttgccagtattccagccatttctggcatagggatcatagcccagaaaggcagtcaattcagcttctaacaagttattaacagcctgttgtagctctttgcgcaataaatcatttattttgtctggattgaatagagcttgagcaaaatctttggtaaaatcattcatgaaggagttcttctttctgtatgtgtttttttgttcaaaccaatcatacgagaaaggaactcctttttctaatgtttaaagaaataaatttaaggaatcattcatccttacacaaactattttacagtctcttttttgatttacataaataaaatacagtaaaacagatataacaacacctatactaatacttaaagaatttaagtctttaaaaaagttgataaaacctaaatataaaaaaactataaggtaaattgaatattcatacagttttactgttttccatctcatattttttctcataccaaattaaaaatgtgttttcgtttttatacctatttttcgtttaattaaagaaaagcctttctttaaagtattctttccaccaatttgtccccaaggaacttctacataagtaaatgaattggtaccaagccaaacatccattaacaactcagaaatatatccaaatactctcgcttcttgcacagaatattcagaaatattaatgctattttctagcttacttagaacatcaaacatgaagctacaatatgattcaaatgcattccttttcataataaacatattaaacatatgagccccacgctttttcataactttatcaaaagcaggaagataatttggatatacttcagcaattacctttcttgcttcatccaaaggctctttatgatgtgcatgaatgtaatgtgaataattagtttcaatataataatttctttttttaggtaaaattacatcatatttttgtaaaagctgatttactttctcaatactaattacattatctaaagaatatggtcttttctcaaagagtaatcttctatagtgaactaatccaatagcgtcaacatcttttaaattcttccaagcccaataaacagcagttagttcattgtaattaggatttttagaggatatattttcaccatcatcatcacgctgataggaaatacctggtttataattctttactgcgcctactaatactggtaaatatccttcctttttgggcataggaaactctttatgcgcagcaaccaaaatttctattttcaaagactcttctcctgatcaatacgctccattaggatgaataaccaccccaattgtcttaacaatcaacttcaaatcttcccacaaaccggaatggttgatatacacaatatcaagccaaaccatttcgtcaaagtcagcttcactacggcgtgttacctgccacaagccagtacaacctggcataacgagcaaacgttgcttatcgtagtcagtatactcagctacttcagagggtagagggggccgtggaccgactagtgacatatcgccgatcaagacattccacagttgtggcaattcatcaagactatacttgcgaattgtatgtccgatcttcgtaattcttggatcgtccttgatcttgaacattgcgccgtcaatttcgttctgatcttctagttcatcaagcatttgatcagcgttaacgaccattgaacggaacttccacatcttgaacggcttctcatctttaccgattcgttcttgagaataaaatgcaggaccaccatcttcatgtcttatttttattatcaaaaataaaaataacggagatagtaaaattaacccaagtgcgctagctagtatatcaaatatccccttaatcgtgtgatacactggtcgtccgttaacttttgcaggattaacttgtagtttatcatactcctcttaccctctgtttgatttagtctatttgaatacactctcttattaatcttatcacgtttaacgcaacttagaagcaaacttgcatatttgcaccaagcattaaaataaccagaactttttcttctgcttcaatgggtgccaatccatctgaactgggtcgccattgatgatacttctagcattatcttgccactgctgagctagatcttgactgaattcttgactcatctttttataagcttcactcaattgatactgccgtcttggcaagtcgtgtgcgtcgctagcaaaggtgcatccctgccccgtcgcaatcaacttacgcgacatctcttcgattttcttgccaaagattcctgtataagagctagcagtaatttgcaccaagcagccttgttccagcatcccttgcaaaatttccggttccttcaagatgcgactattgcgctctgggtgtacgataatcggcgtcaccccgcgctgcatgatcttgaagatcgtgtcttgcgcataagttggcacgtcctcacttggaaattccaacagcatataagtaccgtcttcatcgcagaacaggatatcatcgttatcaagcgcatcaattaagtcacccgacaagcgaacttcctgccctgggaaaaccgtcaacggcaccttggcctcatctagcttctgttggtagagatcagtcagccagacgatatcatccttatggttagtgtaacgaccattcagtgtatgcggcgtacaaattgcatgcgttacgccatctttgaccgcagccttggctaacttaattgaagtgtcccaattttttgagccatcatcaatgccaggcaagatgtggcagtgaatatcgactaaaaccattattgatcgtcactcttttttctaccgaacaggccctttttcttctcagcgccatatccataaccatagccatacccgtagccgtaaccatagccaccgttttcagctctaatgtcgttcatgacgtagcctagaatccgagctttggcaaattttaacatttgcactgctctagtaatcccagccttttgcgtaacgccttgacgtactactaagactacgccgtcaaggtgactagccaactcttgcgtatcggatacttcaagaacaggagctaagtcaatgataaccatatcataatgtgacttaaccaattcaatgaaggtttccattctgcgtgaaccaatcaattcagctgggtttggtggaatcggaccagaagtcaagattgacaagttatcaattccactttcttcaaccacatcatttaaattgattgcgtcagcttctgaagtaagaacagttgtcaaaccagtattgttcttaacgttgaacgtactgtgcaaagttggacgacgcaagtcggcatcgattagcaaggtcttgcgacctgcttgtgcataggtgatcgctacgttggccgtaacggttgacttaccttcactgatgttagctgaagtaaaagctaaggtactaatttcttcatcaactgccataaagttgatgttagtccggatagttctgaattgttcagataccgcactacgaggatcagcaactgtgattaatttggcaccatgcttaattgtatcgtcggtaccacgcttttttctaaataatgccatttacttctcctctcctatactcgacggcttctacgcttagggccattagaattcttattcttttttctaatgacaaatgatgatgacacatggaagtgtgaaacttgacctaagtcaactaaacctaagttatcagtcaagaatgcatcatccttaactgtagtgtcggacatttcacgaattaagactactgcgaaacttaaaaccaagccaataacaaagccagccaaggtaaagagtttcacattaggtgatgattgattaccatcagttgctggcgcaacgatcgtaacgttgttaatgttcatgatgttaggaatttgatctctgaatgaacgcgctacagcgttagcttcaacctttgccttttcaggtgtatctgcagtagcagaaattgagaagacctgtgattgttgttgagtattaactgaaacgctcttggctaattcgctagtagaaacgctgtaactcttaccgctacgttcaactacttctggttgagcctttcttactaatactcggcgaccctctgcattagtcttgtacttagcaggtttagcctttttaaccactctaactgggttagctaaacgattagaagcatcttgcaaaataacatgactagttacaatatccttataggtagtaaccatttgcatgttggcttgttgagtattatatgccgcattcgggtcattcttgttagccttttggttaaccaagatctgtgcattagaagtatactttggtgaaataataaaattagcgacgccccagccgactaaagccaaaccaacactccagataatcagtgcccagatgtggcgacggcaaatttgtagcaattgagtaagatcaattgtattttcagtttgcttttgctcttgttccatttaccttttcctttaataacgattaacgattcataatatagctagccttgttagcagctaccttaacatgtggcaattctagcgccgttctgatcttatcagaaactcgttgacgctcttctctacttaccacttcaatttccatagtgccaaacttagggttttgcgtttctttacttacaccctgagcatgatcttgagaaagattgttagtggcttttctataatccatagcaatcttgtacatttgattcatagtcaagtcagtctgcatctcgctagaaatggaattcaagaaacttgaattaagcaaagttgaaggtgaaacagacttcttaagcaaggccataattaccaagcggtcacgctcttgtctaccataatcctgacgagggtcaccatgacgaagttgggcaaatgctaaagcctttttaccattcatgtgataagtctggcctttgacaaagctataacccatattgttgaaagttaatggagaagttacatcaatccccccaacttggtcaattgccttcttcaaaccacccatattgatcatgatgtagccgtcaattggaacactgtaatatttatcaagtgtcttaatagtttcactaactccacccaatgtataagctgagttgatcttggttacaccatattgtgggtaatctgggaagattgcatttgagtcacgtggaattgaaacaatgcttgtactattagtcttagggttgattgacatcatcatgatggtatcagttctacccttccagtgacgacccatggcaccagtatctgtacccaataacaggatattaattggctttttctcattcagtaaattatcaagagtacgtcctttattactcttggtagtcttagcaacgggagtgtacatattctgcgtcgtatcacgcaaatttttgtagatcatcccgcaaacaaaaagaccgactacaatgatcacgccaataataatccaaaaaccgcgccagaacttacggtgacgacggtggtgatgatggcgatgacaatgtatcggtttattacttgattctgcgttattttccattctaatcctcttaatcttataatcgttattattatatactcaagaacccattttgaccacccttaaaaggtttacatgcggcaaatacttaaaaggaggctcgttttattgctgttttgggttgctgaaataatatattttggtagatgtctaacatgtaataaaaaatgcatccctcgaaaaatggaatgcattgctgctagattgagtttaaacggaattatttttcatcttactatcgccttgccttaaattgtactcacactgtacaatatttagtaagacctaaataaccaaaaagtattaagaagtacattaaatagaagttggatagcatgttaagtattgaagaatcaatcaaagaatttgaaacatattttcagggtaaaccaaatgaagttgaagtagtatcacgaactataaaacaaaaaagtagacggccacataaaccgcctactttatcctaattgttatgatgatcacttgagttagttaaatcatcatttttagttagatcatctatatttccaactactccaccaaatagtgtaaacacacctattccaccaaaaatactaccagccaccgaatgcctttgcatcaccaaaaaagcagaaatacaaatacatagaattgttactattgatactactatcagagatgtccatgcgagccaacctcttcttttttgactagcaacttctaatctccgtctatgcctactttcttcaacaccattattaaattatttccttagcagcattcggatacaatttttggtatccctcaagaatatcaggaagcggaattggtccactatgcatctcaagataagccattatttcttttttggtttctttaggcatctcagatttttgaatttgatcaagaatctattcatctagcgaatctttatctgactttttctttatatcattttctagctttttacttggcttttgatctgccataagatattattccctttcttaagtcgtcccctatcctttgccaatcactggcaatagctttttcctcagcattactattactagaatatatcaacttgtttaataatttgacataaggcatagctacatttttcgataattttttaaacactaattgaatatcggtaaacataattctcacctcattcataatctctttctttattaaaagtatacttaaaatttgactcgtggtaaagattattcttctacatgcgatccacttctttccttattataagcatctgtaatacaataaacttaacagcaaataacgaggtgtttttatgattgataatcaacctaaaaagacaaaagcttatatcgcgggcgtaaacttaaacgaccaaaacttcgactactacatgaccgagctggccaacttgactgaagccaacaacatggaagtagttgggcaaagctttcaaaatgcagaatcaattgtcgccggaacttacttcggtgtcggcaaaatcaatgaaattagaactatggctcaaggcttaaaagcaaaagttttagtccttaatgacaaattgactcccgtacaaattcgcaacttagaaaaattaaccaaaatgcgagttattgaccgcacggaattaattctggaaatttttgccagccgcgctcgaactaaacaagctaaattacaagtgcaactggcacgtttacaatatgaattgccgcgtctccatccctccgagaacaacttggaccagcagcgtggtggtggcttcgctaaccgtggtgccggtgaaagtaaactagaattgaaccggcggacaattggcaagcaaatttcggctatcaagaaggaattgaaggctgttgccggccaggaagaaatcaaagcggcacgacgcaaccaaagtcgcatccctaaagtcgctctcgttggctacaccaatgccggtaaatcaaccacaatgaacggactattgcgtgaattttctaaagaaggagccgacaaggaagtcttcgttaaaaacatgctttttgctacgctagatacttccgtgcggcggatcaacttgaaagacaactttagcttcattctgtctgacactgtcggtttcatttctaaactgccccacaacttggttgaatccttcaaggctaccctgcaagaaacgcgtgatgctgatttattaatcaacgttgttgacgcctctgacccgaacatggtccaaatgattcggacaacacagaacgttttggatgaaattggcgttaaggaaattccgatgattaccgcctacaacaaggctgataagactgatcgcaattacccacagatcgaaggcgacgacattctttattccgccatcgatccaaaatcgatcaaactactggccaacttgatcaccaagcgcgtttttgccaactataaaaagtttgacttgatcctgccactaagcgcaggcaaggaactggcttacctgcatgatcgcgcccaagttttacgtgaagactaccaagacgatggcgtccacatcgaagcgaacatcgcgcccgacgaccaaggacgctttcgtcaatatttggcctaactcgattaggaaaaaatatgaaaaaacataatctgctgttcctttttgccctcacatttttgttagttcctactaacacgcctgtaatggctgctaaatatagtgctagtgagtcaaaaaaggtgcgcacttttcaaaaaagctatcatcgtttgagccagaagaattacaatcagactacgctctttaccgtgcagccaaattttggtattcctttttcagcaggagtgcttgaccctgattacatcaaaacttcaatggcttatgtcaattattaccgctcattggttggactgcctgatgacgccaattatgctaatgataacgttaacgcacaacttggtgctgcagcgctagcttcagttaacgcggagcaaaatctgcgagcccatggtttacaaggttacgtcaagcctggctatatcagtgatactgactgggatacagcggaaaatactacattgggcaatatcaatttttcagaatcaactagcggaaccacggctggcgagatcgttaccgatctgatacgtgaagataataatattgcaggtaatggcaacatcggtcaccgcggcatgatcctctcgacgcgagccacccgaatgggaatcggcgcagcttatggcaccgaaaacaacgtcttgtattctgttgaacatggactatttgccgatgatattttgcgccagcctgtaaaaagccgaatcgtttatccagctgccggcgtttttccttacgaattagttggtggtaaaacgccatggtcttactcaacaaccgagcgaatttctggtcagccgaaaatttacatcacggatttgaccaccaagaaaaagcggcaagcgacgcaggtgcgcaacttcggcactgctctttatggtgacggctacacaacgacaatcacttaccgacctggcaaaaccaagttgatcagcacgcacaagtaccgtgtgcaaatcggcaaacattatagctacagtttcaaatttttcaggcaaaatagcacattgaaaaataaacagattgtaaagcatcgaaaatgaaatacgttgatatgcaaaacggctcaagcagttgtacatcctgcttgagccgttttagatagtaacaaatattgtagtctgttcaacaatcttcatgtaaaataatactcaggtctattgcagcggttagctaccgctaagacttagtaattttagcatggctacacacccctcaagattttttaagttacggaggtggaagcatgcataattgggtagactggagaagtaggcttacaaatgattgcttgggctattgcgtatgcgataacaaaaaaagctaatcacaaggattagccgaaacaacagtcatcttaagttacgattggagttagcgaccgacactcgctagctccttttcttttattattttaatatgatttagaatttattgcaatgtttagaagtgcttattctacgccaatgacgtaacgcatgatgaatcaatagcttgttgtaccaagcataattgtgcttcatataattataggcggtggcaaagttatccaattgtcccgccgcgataaattgattgcgtgtccaatgccaatcctgagtaggataatacaaaattttcactcggattacccttcctactgtaataattgcccgatcatgatgataacgcgtgcgagcaacattgaggtagctaccaattaaagtattgcgccagtatcgattatgcagataatttttctcccaaagtaaggccttgcgcaataccttagaaatgcagtaccattcgcgtttgccgttaggcaattcaaccaaacaccaaagatattggtgtctcttcgccattcaatccaccccttctaattaatatcggctttaattataccgctactagctattcagttagaaaatcaataatgtcagaaaatattaggtcatgatgtcaaatctattcaactgacatcatttgtcctaagaacgcatttaccgcttgcttaatatactcgctgcaaaggtgagtatactgcgttgaatttctggacatggctctgcttaaacggtcttgatgggtgtcattttaatccttctttaatttttactataattttctccacactgaaaactatggcaaaaaaagtagaatttttcagtctagggaaaacttttatcaatacaaaaaagcaagcgcattaatcgcctgcctaaaagtattccaaattacttctctatagtactctcttagcaattgatggtgtaaagtaactcgataccgtttgcaaaatagtaccttgctctggtgttgctgcatttacatattgattgtttcctacataaattgcaacgtggtatggagctgtcgttgaaccccagaagactaagtcacctggctgcaagttgttcaatgaaacagtttgaccaaccttaacttgatcataagttgttcttggtaagttcacgccagccgctttttggtaaacatattgtactaagccagaacagtcaaatgaatccggaccttctgcaccccagacatagttcttacctatctgttgtttagctagcgcaacaattgaagcggccttactagtagcttgcgttgaagaagtttggttagtattttggctagtcttcttgattgccgtattaacaatttgcttagccttcttcaccttagctatcttttcagccttcttctgagtagccgttttagtagctactgccgctgtcttcttattaacagtagtctttgtctgcttagcttccgttttcttaacagttggtgcttgcgatacttctgctttttctccagcagtaacatctacggtataacgcgcttcaatccattcacgcgttccaaccttgtaccacaagttgcccttcttatcgagtgcagtctcagctacattccagaccgtgccgtccttagcacggtagcccatgaattgaccattctcatagttggtccaaatattcaggctcttacctggtaaatagctaatcttaacttgcttaatcgcagtaaaattagctgcacgaacagttttcattgatgtgattgcggaaacacccgtaacggtcagggctgcagccgctcccactttaaaaaaattatgtttcataattgaatccccttggtagcgaaacaggtgaaaacttttcacctaaaattacccactcttactatgtaacgccttcattattgcatgtcctacctcaagaagcaaattagaacattacaatattacaaaaaagacggatcactggaatccgtcttcattacttactatcttaatttaaaacacgcttagcaacacttgggtagaagtatgaactcaaagtttgcttgattacgccttgacctggtgtagcagcgtggatgtattggttgttaccaacatagatacctacgtgatatggagcacttgcactaccccagaaaagcaaatcacccggttgaagattatccatagaaacggttgatccttgcttaacttgatcataagtagttctacccaacttcacgccagcagcgttagagtaaacatattgtaccaaacctgaacagtcaaaaccgttagttcctgtaccaccccaaacataggacttgcctaattgtgctgaagccaaagtaataactgctgaagcatcaccagttgcttgaactgacttcttagcctttttagctttcttaactgcttgagccttatctgaactagcatcaacagtatattgagctaaaatccattggttatcaccaatttggtaccatgtacggcccttcttatcagtcttggtgtcaaaaacattccaagtagtaccatgttgagcacgttgaccagtaaagtggccaccattgtagttgtcccatatgttaattccataacctgcaatgtagttaatctttactttggtagtagcagcttgaacagtagcattagttgaatctggcttgatgacatttactgcagctacaccggtcagagttaatgcagcagctgcggtaacttttacgaaattgctcttaatattcatcaaattctcctgtatgttttcactatatctataagcattcttagaatttattacttaagctggtaacgaaaatattaattcatcgaaaaatctttaaatttctttaatgtatttaacaaaatctataataatgccccaatgttacagtagtgttacaaaagtaatactgatttaataaatattacgtttccgtcaaaaagaaaaatagctagggagatttccctaactatcttaactagatatcttatttttaggaagactaacgcaattagtcgattacacgcttagctgatgatgggtaaaatgaagctaaggtttgttgcttaacattttgaccaggagctggagcgtgaacaaacttaccgttacctacgtagatacctacatggtagttaccccagaataataagtcacccttcttaagcttcttagttgaaactgaaatggtcttaccaagagtaatttgaccgtaagtagttcttggcaaaattttgttaattgcattcttgtaaacgtagctagttaaacctgagcagtcaaaaccgctaggacctgcagcaccgtaaatgtaaggcttgccgatttgcttcttaacaagcttaacaaccgcattacgctccttagtagtagctgattccttcttaactgaacttgaatcaggattggtagtttcaagatctgaaattgagttgttagtattgatagtagtgcttgaaacatcatcagcgtgaacagctggaacattgatcattgaaataccggcaaagaatactgataaagctgcggtgtattttactaaagtacgtctaaaattcaaaattaattgtctcctctaaaaattactaaatttgtttttgatttcttaaatcagttgacggtttatataataccgactgaatgttacacgaatgtttcaaaagagctaccatcgcgttaagaaacatgttaaaaaaacagattttatgtaaaaaaaggagaagcaaaatgctagcgaagctttgctacaagggcatcgagcgcgtttttagtttctgttaaattgtcgttaactaagatatgagcgtattgcttcaaatcttcaggtaaagcatttaattcactgccgctaagtctttctttaatcttggatggatcatcgccccgctttaaaaggcgctgttttaactcttctttagtagaagttgtaacataaagaaaataagccttgtcacctagctgtttaatgtaggaataaatgcccttgatatcgacaattaatgaaaccagatcactttttttccaggccagattcaaagcttctcgacttgagccatattgataagagccgtacttaatatgctcaaaaaagtgcagctgggcaaaagtttcatcggtttcaaaatgataagaaacattctgctcctcgcctgatcgcatcggccgcgtggtatgcgttaatacgcgtggaataccatatttttcagttaaatattctgaaacagtcgtcttgccagcaccactaggtcctgcaataagaattatttttttcaaaacctgattctccccacttgaaaatgttgcttttttataatagcattcttgtgttataaaagactaagactttttctcggaaggaagatacacataatgaaaaaagcagacgtaaaagttggtgcaatcgttggtgccaagtcagaagaagaacttaagaagccattccaaggcaaagttgaaaagatctacgaaaattccgcattgcttgcaattacttcatacgatcccgttgacaccactgctatcagcgacttgaacaataagatcgtagttaacttcaagaatttaaagactgctcgcgctgccaagaacagcaagactgcttcaactaatgaagttaagattgaaaaaattgccaagaagaacgacgataaaaaagaagcagacaagaagtaaaatttgacaaaaatagcccgcgcaatgtttacgcgagctatttttttgcctaaaattaggacatcgatacgagaggaaatattttatgaaagaaaaaacgcgaactgttttattttggtttattttaatccagccctttttagacctttattggttctacaacggtaaattagcggaagttttaccatttactctacctacgattatccgaattttagctgtttttgtgattttctgtatgtttttcagtcaaaagcaaaattggcaaaaattagggcaagacaagtggttaattctatatttagccctactaattttgtattcgattattcacttaatccacgtcaaaaactttaacagcattaatcctaatgactacaattattcaaccgtaagcgaaattttttatctcattagaatgcttttacctctgatggtgatcttttttacaaaagaattgaatttcagtcaggagcaattcagacacgttatcgaaggcatcagcggacttttttcatttacaattgtcattaccaatctttttgtcatttcgcttagaagctacgagacaggcccgattagcgctaatatttttgaatggtttgttaaccccaatatcggttactcccatatggcctccaaaggcttcttcaattttgccaacatggtatcagccgtactctttatgctggtgcctctgatgctttacttcatgttcagtcgttttaactggaaaatcgtcactttgaacgtagttcaagctttagcgatgatcgagttaggaaccaaagtggccctcatcggtttaatcggtggcgtgattatcagtattttgctgtatgttttccacttatttattgttaaggatgttaacaaaaacggcaaagccattatcgtggcgcttttaatcgaagcgggcacctttgccatcatcccctttggtccagcaatccagcgctataattatgaaaaatatttggctcagcaatccgatgattctttgacacaggccaagcgagaattaaatgctggcttaaaaaaatatcctcaaggtaaacagcgcaaggaatttttaacgaatttcatcggcaatcattatcaagattacgccttaaataagaagtttgtttttaaaagctacccttataaatacgatcctgaattttggctcaaaatcatgaacgagccaggcaccgctagaatgcaaaatcgacatgtagaaaaagcgatgcttgatcaagttgtgaagactaacaataatcgactcgacaagttcctgggcatttcttacacacgagaaaccaacattttcaaccttgaacgtgatttcactagtcaaatttattcacttggttggatcggcatgctgttgttcattgggccttatgtcattatcctgctctacgctttaattaagtggctaatgaacaaagaaaagcggacttatttgatcagctcaatgttgctttcaatcgcctttatgattttcgcagcattctcgtcaggtaacgtaatggacttcttaacagctagcttcatcctggctttcgttgaaggcagcttgttagctagcgtaaccagaaaagaaaattaaacataaaaaaagttaggtagttgcttgcctaactttttcttagtttttaaacattatttttcttgcttaataaagcttgaatctggcacccgaattaagtagtaccgagttgctaaatgacctgcatgcatcccgattccattttgccaattccgcttgtacttagccgtataaattgccacgtaagcacgttgatactttttatccattttagccaattccttttttacataaggaatcttctccgcattcacgtcaagcgcagtgttaccataagcaatcgaagcatagtcactaccaatcgtgaccttgctgccatcgcgataaaaagtataagtttgtgagccatatctcttcttagcagaattaatcgttacatagcttgaatttcccgcacctgtacgcattatcagtggctcatacttcacgcttgaagtaatgcggtttgcatcttccaggtctggattgtccataaaagtctgattaaacatccaacctgcagctaataaaagtactacaatttccacaatattaagagccatattcggccaactaaagcgtttatgctgtttgataatcatcttaatccgtctttgacggatgttctggacgatgaaaactaaataaagaatgatggcaacccaaatcaggatcccaatgatattccagctgaacatatctcgccctgctatataaaacatagaaacatgcagaagttttcatatttctacatgtcagaaagaaatatattttcctttctttgtcttatttactgctgtcttcatcagtattccgatattccatctggggagtaatcgcattgactaactcttgcagcttaagggcttagccagcccattgtttttattttgttaacgctagtaaatttaatactgcattgtcatcacgatcattgctatagccacattcataacaaatgtattcattatgcttggtgccatgttttttattgccctgcagagtaattttgtctgcaccagttttgacatagccacaattggcacatctttgtgttgatggatatgttttatcagctagaattaattctttgccataccattcacacttgtaagtcaagacttgtctaaacttgccaaatagtgacctttgcatgcctttggaggctacatgggtcatcatcatttgtttgacattcaagtcttcaatgacgatttggtcataattgtttacatgctcagtggtaaatttttgcaaaagatcattctgaatattggctgctttgcgataatcacgctgaagcttggttctcacttgcaggtaattattgctttggcttgccgatttaccgttaactcttctctttttagacaatactctttgataatgcttgattcgcttgtacagtttctgtagttttgctggcaaaacattaatcttgccttcagtgtagttgaaatgcccaacgttgacatcgatggcggtctttttgccagttttagcctttagtccagcctcttcttcataggaaagggcagcgtaataatgtcctctttctctaaagatgctggcaattttaacctcttccatctttaatgcctcgtatgctggaatatcaaaccaagatttaatccctctaggcttatctaatctaagcttgccattaattatcttggcgcgatcagttttaaagccttgacgtggagctttcttagatttgaaatgcggcttgccccaatcaggctgggtcttgtcaaagaagttcttccaagcattagccagatccttgactgctaattgcagacagcgagcagacaaagcaaattgccaatcagccttgttattgactaattcatcccacactcgatgctcattaggactaggattattatccttgtctaaagtccaagcttcatacatgtcttgccaggttgctaaagctagattccagcagtatctgcgatagttacaaagacgttcaagttctctttgcattatcttatttggccttaattcgactacctgagttttgatcatttgtttcacctccaatgcaaacataagtttagcaaaggatgtaacaaaaacaagcgaacaaaatattaaatttttagcagcagttaatttgcttctatgttttgcctttctgaacaaattacctgtatctttttctatattgccattaaattctatatttcagctaaccatttaatcctcctttttttcaattatatggtaaaaaaagcaaaatttgaataggataataattgaatacttagttaaatagtgagaagatcttactagtacattagatttattagggaacattatggtagcaatagctttttattcaattactgggcaaacggaacgttttattaagaaaactcaactttcggcccatcaaatcgacgatgccaaccctaagtatgatatgggaaaatcttatatcttaatcgtaccctcatatcaggacttcatgatggattcagtcgttgattttttaacgtataaagataacaaaaaaaatattatagggattatcggttgtggcaaccgaaactttaacgacctctttgctcaaactgccaaaaagatcacggcaacattgaaagtgcctattttgtatcttttggaatttagtggtactaaccaagatgtcaaaaatgtacgaaaaatcgtacacgatctttctgctggtgagagtactaagcaagtccaaaagcctaaggaattacgtgggaatatcagctttttgagtgattttagagattaaatatgactgaaaaatattacaaagcaattaactggaatgacatggaggaccgggttgacaaatctgcttggtcccgcctgaatgatattatctgggaaccccgtaatgttccagttagagaagataaaaaagaatttttacaattagacaagccggtgcaagatgccttgcttcacgcattcggagcactatctttttcatctggactccaaatgaaaaatgggctagagcaaattaaggtagatgccatcacaccagaggaagcagctgtgctgaatgccttgcaatatttggaatctattgccaataaaggctacagctacgttatcaacgagttgacggactcaaatatagcaaaagacgttattaactgggctgatgacaatccttacctgcaaaagaagattcggattttgaataaaatctaccaaggcggggatgcactacaaaagaaggtagctaacgttatcctagagacagctctctatcattctgccttctacgctccgctttatttattcggacaaggcaaaatggtacgaacagctgaaattgttaagttagctttacgtggcacttcatttagtgggatttatcctggttacaagttccgcttaggctaccaaaaattaggtaaaactgagcaagcagagctaaaagaatggatcgataacttgtacgatgtgctaattgataatgagaagaagcacattgagttaatgtacaagggcactgactggatcgatgatgttacgcactatctctactacagtgtcaacaaggcctacctcaacctaggtttttcagccaagtatcctgacacttctgattcaatcaaccctattattgaaaaaggggtcatcaagaatgcagtgcttgaagacttcttcttctacactaacgatcactcgctgactaagtttaaagaaattaaataattacaaaagacgcaatcgaaaattcggttgcgtctttttttacttcttagtagttttcttggttgcctttttagtagcggttttcttttctgcttcctttttttcaggcttcttatattcacgtattgtggttagcttttcaataattgcctccaccagttgatcaacaatcttcgctggatcttgttcgatctctacttcactggctaattgatcaattctaaagcctgaaacattaacgtattcagagcgcgtttcaaagtaaacatttaaaggatattccttaccctcttcaaagaagttagcaactcgtttgtaattgctataaggcaaattgataatatttgtctccaaggcaaaagtagccggccgctgacccgtcactgctagttgcgtttggatcaatgaattatgcttaaaagcagcgataacttccttgaccatcttttcagcatacggcttgattttgctcttcgacttgctaatgtcggcatatttaactgtttcaagatcttgaatataatcttgattttcaattttttcgttgagatcttttaaattaatttccaaaataaactttcctttttcattggttataattacaaaatactacaaaaaaattttttgtcatcctttttaaggattcaattcagtatttttagctttttatttgttaaaatgacactatgaaaaagcaaaaatttgatcttaagtatttatttttactcattcccattacgttaattctcattataggattgatttacctttttaacaaaaataaaatcgataatgaaattaattggatgacaatgaaggaagaacagcggctcaatgtcccgctagaaaatcaactgcccgatctacccaacggctgcgaggttactagcctatcaatgttactgaattactatgacattaaggttaacaaatatgatctcgccgataatattgctcatgttgattctttcaccgacaacggtaaatatcgcggcaaccccaatcaaggctttgtcggccatatgtctgtcgctaatgctggctggtgcgtttatcatgggcctttatttgacgttgcacgtaaatataccagccacatagaagatgcctctggcagcaattttttagcgattctcaagttaatctccgatgggcatcccgtgctgatcattaccacaaccacttttaatcatgttaacaatatgcaaacatgggaaaccaatactggtaaagtcaacgttacaccgtcatcacatgcctgcgtgatcacgggatacaacaagcaaaagaagcttgtctatgttaataatccttacggtattaaaaaccaaccggttaattggcataacttagaattgagttatgaccaacaaggacgccaggcactttacatcaaataacaaaaaagggcaagccacgaaggcttgtccttttaactcaaggcacatgctcaaagcatatgtggacgtttaaactgttcacatcagtgcgtccaacatcagcacttcccgtgcttgccacttaaggcggatgtcctctatctcataaatatacgcatctcgcgttcattaatcgactcgtcagtcagtaattgtactattttttatgtttgatgtacagtctagcacttttaaaatgacgatatttaaatttataaaaaacttcagtacacatagtcgataacatgaaacctaaagcaatagcaccagtaacaattgctactcgtagaagcaaattctctccttgactataatcccccacaactaaagcacgtactgcttgataagcaggcacgcccgggactaacggtactaaggcaggaatattaaagaccgtcactggactttttttaatgcgtgcaaaacacaagcccaaaatacctatcaaaaaggcgccaattaaatttgaaatcattcgcccaaatcccaaattaaagcaagtccaatatgccatccagcccactgtgccactgactcctgacaggtgaagatcgcgatgcggtacattaatagttaatgcaaaacccaccgaagctacataagaaaaaatgacattaataataatttctaaccaaagtggcatttttatactcctatgaatttaagtacaagtgcaactccaccgcctaaagctaaagcggttaacacagcctcgcacattcgcataatccctgataataaatctcccatgaatagatctcgcaaagcattagtaattgccaagcctgggactaaagtcatcagagcgccgatcaaaatattatcagtaatcatttgtggattaaaatgattgaataatactgccaagatccccatgaccattgctgcaattagctctgataaaaaacgaatcttagtatattttttaaactcataatacgaccaaaaaccaacagcccctactaaggcagcacctgggaaatcaacccagtcgtaattatccataaacaaaaccatcaaggtagcagacaatacagcagctcccaatacctggagccacattgggaaagtaggtgcttgtgatactaaagcaatcttttcttttaattcagaaagagtgatttttttaactgcaaattggcgcgacaagtcattaacccggtctactaattccaaattgatgttgcgatcacgaatttgtttcatctgacttagcttgccaccatctaagctcatgaaaacacaggttggcgtcgcaaaaacacgcggatcatcaattccggcattgcgagcaattctgagcattgtatcttctacccgatacatttcgctcccgccttcgatcattagtcggcccgcagttaaacaaatatccattacttcttgataaaattggacatcccgcttctcagacatagttttagcctcagttcatagtttcaatatcgatggtcttgtcgacccaatcaccgcggaaaaagtcacgttcgtgactaacaataatgactccgcctgggaagttaacaatcgcttttctcaaagcatccttggtatcgttatccaagtgattagtaggttcatcaaggaaaagcaaattagctggttcaaactgcatcttagctaattttactttttcctgttccccaccagaaagttcctttagtggactcattgcttgttgtgcagttaagcccatgcgtgccagcgcttgtcgcaattcctttggctttttgcgttcaaattcttcttgtaaatattggagtggagtcatgttgctattaggccaggttagatcttgcttgaagtaagccaactttgcagtaacagataactcatatgaaccataaattggctttaattgccctaacaatgtcttaagcaaggtagtcttaccaattccgttaaaaccagtaatcgccactttttcatccccaccaacagagaaattgaaggctgacttgaccaaagcatggtcgtaaccgatgaccaaatcttgcgtctgtagcaacaaattagaagcagtcgcaacatatggaaattcaaagcgtgccttgcggttgttttttggcggtgtcaaaacatccatccgcgccagctgcttttcccgtgacttagcactcttagcacgtgtacccgccttgttcttgcgaatataggcctcagtcttagcaatcttgcgttgctggttagcataagccttcaagtaggtctcacggttggctgctttttgccgcaaggcttgcttcaacgttcctgtataacgagtaattgtgccaaaatcgatatcgataatgcagttagtgattcggcccaaaaagtcataatcatgactaacgacaataaaggctccagcaaaattgttcaaatagtcaaccagccaatcaatatgtgaaacatcaagatagttagtcggttcgtctaaaaccagaacatctgggctttgcaacaacaactttgctaaaattattttagagcgctgaccaccagataacttagaaacatcgtgatcatagcctaaatcagctagtcctagtcctgaggcgacttgttcaatttcagtatcaatatcataaaaattattttcttctaaataagtctgtaccttgccggctttttctaacagggcttcgtccccgttttcggcatatttggcatacagatcattcaactctttttctttttgaaataattgatcaaaagccgtccgcaaaaagccacggatagtcacaccaggtgccaatttagcatactggtccaaataaccaacatcaattttattttgccaagttacttgaccatcatcgggcaaaatttcacccgttaaaatcttgattaacgttgacttgccaacaccattttgaccagtaacccccatatggtcttctttgttaagcacaaaattggcatcttcatataaagttttatcaataaaactctgacttaaatctttaacagttaataaactcatttttcatcccctattatttagctgattcatgttctttttcataattttggagtgcatcaagaacacgaggccaatagcgcttaggtaagatcagttgcaaacgatcatgataaataggaaaatcacttgcttttagccccgtaatcttagctagctcctgatctgtcagcttatatttataaacaatacgcttaatttcgactgatgcatgtcctctaaaataggataggccgaagaaaaagatagcaaaaacacttgctgtaatgattgctaattgcaaattcatcctgaagctgtgtagacaaataaaaatcacggcaataaaagaaatcacagctgagagtacaccgtaaataactggaaatattgattctttttcttccttttgcataatcttttcctccctaattgagacttagtaactttacgaacttagcaaaaattgttaaagtttgcaagatacgacgttttcattattttttacataagttaagtatacttagcaaaaatgaaattgcacgaagaaagaagaaaaatgagccaagaaaagcaaaaatactattttttcccacttcgttttcaacaacaggacttaaagattgaactagttttgcctcaaattacgcaagctgaggcactttatcaagctgttgtccgcgatcgaaagcaattaggtcaatggctagcctgggctgatcaaatgcactcagctaacgatgaagcaaaatttattaagcaaattcaaaccaaaatgtcccagcagactatgctcgtgctcactattttagtcaatggcgaacctagcggcatgatcgacttgcataagctagtgccaaataaaaaagccgagattggctattggcttgctagcaagtatcaaggccgcggcattgttactaagagtgtaacggcgttatgccaatatgcctttagtgaattgaacttgcaatacattgatctgctcgttgccgttggcaatgacaagagcagcaatgtcgcaaagcgttgcggttttaaattaatggggattgagccaaaattaattaatggctatgacggccaaatttttagattaattcgacgttaaaactactttgttagcttgtcattgcgttaaatattaggtagactaataaaacgagtgtttggaatcttaatactttactaccaaaacaaactcaaatataattatgttatacgatgcttagcatcaatgagtggtcggctcatggtcaatctgattctaatgcaggacataagggcctgacgggtcgcagggaccaaaataaacctgatattatatatctaagacataagggcttagctggtggcagacaccaaaattaaaccgacttaagagttcacgagtttgtgaactcttttttattggagaaaaaagagatgaatcgcaacttatttaaaaacgcaaatttaaaagaaatcggacaattacgtcgttatatgtcgattatttatgataatgctgacttttacagcaaacactttgtaaacaaaaccattatctacactactaagaataaaaaaaatcgaacttactgctagaagagataattttatgcatttgtgtggagtaacgtatatcgacggtccaagaaaattttttaatgatgcattagatcaaaaaatacaaatcaaaaaaatacttataaaaaaagatgggtctacctttcaaaaattacaaattatgaatcaatttcaagaaatgcttggaccacatttaagattaacaggacccagtaattttacatatttaaaatttgatcactctatacgtaccaacaaaagcatactagctcttgcactattaaataatcaaaactacatgatacctatctctttattaaatctaaaatttattcatccttttccaaatggagaaaaaataataaaaatagaatctcgagatctaaaaactggtaaaattactattctcaactaaaaccaaccagtcagatctttaataatgaaaaagataattggaactaacaatgatggtaaaaaatttagcgttttaacatcacgaatcttcaataaagctaagccagagcaggcaattaaaaagccaccaacaatggaaatctcagttaccaatggtcccgtaaaaaagctagccgacaaaaatttagctaccaggtaaatactaccctgccagcaaaatagcaccggagcaacaacgagcatcccccaaccgaaactagcgccaaaaaccatcgaggtcacaaaatccaacgtagcattagtaaacagcatcgtatagtcgcctttaactgccgcaattactggccccacaattgatagtgctccaatacaacaaagcaaaatttcagtggccagccctttacctaagtttgatttacctgttttttctactaagcgatcaaaatggccagagatatcccaagccgtgccgcacaaaccaccaagtgctaagctaacaataaataaaacaggatagtgactcttgggcatattattagtaacattctcccagccaatacctaaggctgctaaacccattgcaataaagagtacatcttcaaatcgtttattgattccttttttcaaaaaacagccaatagttgttcctactagtaaggctaacgtatttacaattgttccaatcatccttctcacctcttaagattattttaccgcagaaaaaaagtatccttgtcggatactctttcatttaccagtgaaaatgccaaccgctacttgaactggatgatgaacttgaactagacgagctgcctgtccctgttccttcaccataaccagaattagaaccgctggctggcttatcctgattttgatcataaatctgatagtttgtaaaagcctgcggatcatcccacttaatgtgattgttctgatcattcaactcattctgccgtgtttcctcgttattaagcgtttgggtcgataaattcaaattcttgcgaattctatcagaagtcttttgcaattccttagttgaagcaacttgaattgaggctccatcaatccaggcatcatgaccttgaatatagctactcttcatatttttcatacagccacgataattcaacgccaagcttaacatatcgttgaaggtcaaattagttttcacatacttattaaagacatcaactagcttgcggtaattgctgagcgtattaactgacatggccttgtgggcaattgcctcaattacttgacgctggcgcatctgacgaccatagtcaccacgtggatcttcttttctcatccgcacataagctacagcatgccggccatttaagtgctgtttacccttgtggaaatcacaccagtcatatgaaaagtcaaacggcacattcacatcaacaccgcctaccgcattaaccaagctcttcaatgccttcatatttacttcaagataataattgattggcacattaagcatggacgagaccgtcttcatacttgattcatgtccgccaatttcataagcagagttcacccggaacataaagtatttgtcacctggatcgcctttaatatctgctaaggtgtcacgtggaattgaggtaatcgttgccgagtttttttgcggattagccgtggctaaaatcatggtatccgaattacctcgatcatgccgtccttcaattccttggtcaactcccaacactaaaattgaaattggctgtcgattaacaattttagcggaagtagcagtattaccgccattcttgctatcaatcacactgtggacagtaaagtacatatgtgcggcccaagctacgccaaagcaaacagctaataaagctaccacgcccactagccgagccagaaagttccctggcttcagcgctggcgcgtctgccgcaaatgcacgattacggtgaagattaagcgatgaacgacgagcacgataatcttctcttcgttttggattttggtccattcttttgatcttttcccttcgaaattaatacaagttagtttatttgtatcacttttcgtctctagataaaataaaaataccgatacgcgtggtgctagttaaatcgttttagttaataaaaaagtccaatcttgttagactcgacttgtaaatagtaataatagaaaagagtctgatctgattgaactgccttaagcttaagcgttttagccaccatttacaagttagttttaaagatttagtgataatttgtcggcactggtatcgtttgtatgcaccggctgagtttactcatcggcgaaatattgatcaaattaaaactacggacagtctgattttggctttacttatctggcaagctaagacaggaattgaatcacaaagaagattctgtgaatgtttcaattgtttatcacactcacgttttaatcgacgttcacgtcagctattgcaattgatttatcagatacggcaagaaatgaataaaaaggttgacctgaatggacatttcttgatcattgacagctttccggtacctgtttgccaaccaattcgcaactatcgtgctaaaatttttcgcggttatgccaacattggttataaggccaccaagaaaatttacttctatggtttcaaagttcatgtcattgttagcgatgacggttacattcttgattatgtcgtaacaaaagcatcagttcatgatgccagggagacagttgaactgctggaaaatacccatccatctaattactatcttcttggcgacgaaggctatttaggcaaagaactgcatcaacagctaaaacaaatgggttatgaactttggacaccatatcgtaaaaatatgacaggagctaaaaagcacaatgatcatcaattgatggctattcgcagaacaattgaaagcgacttttcgcttctgacctattacaatgccgagaacaatcgagcacgtagtctgataggctttcaaagccggttggaaattgcaattttagcttataatttggcttattgtctagaacgatttaactagcaccacgcgtataccgataattaataataacttatttttttgcgaaagatagcataacaggctaagatgtatacaaattgaaataattatggaggaaaaatatggcgataccaaacagaaatgaagtcccagaagaacttaagtgggacttgacccgaatttttaaaaatgatgaagaatgggaacaggcctatgcagcggcccaagaaaaaatcgaccaacttggtgaattaaaaggtacattagcaaaatctggcaaagatttgtacgaaggcttaactaagattctggccgttaagcgcgaggtggaaaatatttatgtttatgccaccatgtctagcgatgtggatactgccaattcacattatttaggctatgtcagccgggtgcaaagcttagctaaccaattcgaagccgctactagttttattaacccagaaatcttgagcatccctagtgataaactagctgaatttaagcaagctgagccaagactaaagaattatgctcactacttggaaatgattactaataagcgacctcataccctgccagctgaacaagaaaagttaatcgctgatgctggagatgctttaggcgtttccgaaaatacttttaacgttttaactaactctgacatggaatacggctacgtccaagatgacgatggcaacatggaacaactatctgacggtttgtactcattattaattcaatcgcaaaaccgtgacgtcagaaaaggtgccttcgacactctctatgctacgtacagccaattccagaattcgctggcttcaaccttgtccggcgtagtgaaaaaacacaactataacgctaaagcgcacaaatatgactctgcccgtcaagcagcactggctgaaaacggcgtacctgaagcagtttacgatactttaattcaagaagttgattctcaccttgacctgctccatcgttacgttgccttgcgcaagaaaattttaggcttaaaagatttgcaaatgtgggacatgtacgtgccgctaactgggaagccttctctttcttataactttgaagaagctaaggaagttgctaaaaaggcattgaagcctttgggcgaagactacttgaagcatgttgactatatttttaataatcgtgtcatcgacccaatagaatctaaaaacaaggtaactggtgcctactccggtggtgcttatgataccgatccttatgagttgctcaactgggaagataacatcgattcactttatactttagtccacgaaactggtcactccgttcactcctggtacactcgcaatactcaaccttacgtttacggcgactatccaatctttgtggctgaaattgcttcaactactaatgaaaatattttgaccgaatatttcttagaccacattaccgatcctaagacgcgggcctttatcttaaattactaccttgattcatttaaaggcactttattccgtcaaactcaatttgccgtgtttgaacaattcttgcacgaagccgatgctaatggagaaccactgaccgctgacactttagacgacgtttacggtcaaattaatcagcattattacggcgatagcgttgaaccaggcggcgatattgcccttgaatggtcacgaattccacacttctactacaatttctatgtgtaccaatatgcgactggctttgcggctgcaacagcattagcaaacaaggtggttcatggaacgcctgctgagagggatgcctaccttggctttcttaaagctggttcaagtgattacccaactgagatcatgaagcgtgctggcgtagacatgactaagcctgactacttagaagatgccttcaagacttttgaaaaacggttgaacgaatttgaaagcttgattgagaaataaataatcgcgctcatataaaaataatcgatatcatttcgtgagatttgatatcgattttttgttgatgatcttgatttattacttggcatatttatcgctcaatatgtataatacgtatataagtattatagtgccagaaaaggtgaaaaatatggctgaaactttatataaaaaggtcgttaaaaatggttcttccttagctatcaatatcccagctaaggaagtaaaagagcaaaatctcaaagtaggcgatattgttgaagtaaaaatcaaaaaatcagaccgtcctaattctgaaaatttaaaagaaatagatggcttaatttctgattactgggatatgttagagtacttaaaggataagtagtcaatgaagatcaattatctaacagaaaaggatattttagtaatcaatgcaagggttattcaaagagaaggtgcaacgggacaaaaacctcacgttagggatgcagaagcccttcattttttagttgttcaacctaagcaaactagttttggacaagaattatatccgtcttttgctgaaaaagctgggattttattaattaaattagttaaaaagcatgtttttgaagatgcaaataaacggactacagcaattgcattcttactatttttacgacgcaattcttatgaactaacctgtgattggcaagatttagcaaatcaaatcttaaagatcgctcaaatagatgacaatgaactaaattaccaagaaatctatcaatgggttaatcaagtaattcatgaaaactaaaaataatcgatatcattttcgccctaatattatattttatatgaaataataaccactttataaaaaaataagggctattaacccttattcataataaatccatcaactatttcctatgtcatactactactcgattgtcctgcataaccagctagtgtagcctgcaagtcatgaataactttaggagcattaaaatttttagcaaattcgtactgttgcaattgataatataatctagaaccgatatataaagcagaatcattattttccgcttgatcaattgttctatccaaaattcttaccaaatttggattatcaattacatctttactaaaacgaactttttctagttcattttttaactttaaagtctcatccttcttaatcattatttacaccaaaggatgcgcaaatggtccatccttctgccatccagtatacataatacgaccaacgctatcccacatttgtgctaaattatcatgacaataatatcggttgcaatatacaccattaccatagtaatggtactttccgcctccgcgcttgtgatgtgtaccgcctaaaacttgacttaattgattttcttttagttcttgaaactttaccattccagacacctccgataaatctttaagcctgcctcacttagtacttctatcaacttacatatataagtctaccaaaacagtagtgttttctaagaaaacgtcagaaactggcaacgttcatatcatattctgttaaaatacataatttgatcaagaatttagtacctgtcgatttaccaatcaaatactccagttacaataccgttagcacccactgctgcatatctttctagtttcagctgaagttcaactatagctttaggtagttcattttcactaaagttttctttcaatttcaaagacaaattagaagcaatcgattgaattgactcatgcttatcagctttcgcaatagcagcttgtaataactcaaccaattcggcatttttcttaacttgaggatctgaaatcactgtattcaatctactcttaaatgcagcttcttctttaagattctttttaaagaacatatttatctccttgtattaaccttgatttttcagaaaatcatacaactcagtagctgtttttcctccacctacccatgcgttagcaatttcaccgtttttaattcgcataacagtgggagtacctggcacttccaagttatcaaaagcataatctgcattatctttactttcatcaatatttaaatagtataattgaccaccaatcagattattaaattcatttaaagtggctgaatattgtcgacaataatagcacgttgggcaaccaatatacaaatatctatcaatattatcttttttatcgaaaaaagaatctacttcatctgaattaagagactgtaaaatattttgtgtaaggatgaatgattccttaaatttatttctttaaacattagaaaaaggagttcctttctcgtatgattggtttgaacaaaaaaacacatacagaaagaagaactccttcatgaatgattttaccaaagattttgctcaagctctattcaatccagacaaaataaatgatttattgcgcaaagagctacaacaggctgttaataacttgttagaagctgaattgactgcctttctgggctatgatccctatgccagaaatggctggaatactggcaactctagaaatggtgcttatttccgcaaagttgatacgcaatttggcccaattgaagtgcaagtgcctcgggatcgcaacggtcaatttcatcagcacacgctgcctggctacaagcagcactcggatatcttggaaagcatgattatcaagctttactccaagggcgtgaccaccagggaaatagccgatctaattgaaaagatgtatggcagccattacagtccagcccaggtatcaaatatttccaagcagatgattccaaaggttgaggcttaccacaaacgcaagctaagcgacaagtttttctgcgtctatttggatgcgacataccttcctttgcgccgagaaacatttgagcgtgaagcagtctatattgccattggcatcaagcctaatgggcacaaggaggtcattgactactgcattgcacctagcgagaacattgaagtctggacagatatgcttcaaaacatgaaatcccgaggcttaaagcaagttgagctctttctttctgatggtgttgttggcatgaaagcggccttgaccaggacttatcctaaagctcattttcaacgctgcttggttcatgtcatgcgcaatatctgtgctaaagtccgggtggatgaccgcgaaaagatcatgaacgaattcaaacaggtgcatcaacagacaaacaaagaagaagccacagctgtcctgcatgacttctataccaaatggggcaaggtttacagccatgttatcagaagcttgaaagacatagaaccagatctgctggtcttttataactatcccaagcagatcagagcttcaatttattcgactaacatgattgaatcatttaacaatgtgatcaagcgcaaagctaagcctaaggcagagtttccaactgaacagtcgcttgatgcttttattggcattcaggcaatgagctacaatgaccgttatttcaatcgaattcataaaggctttggtcaggttcaggacaccttagaatcctactttgattaaataaataattaaaaaatcaatttacgagaaagatctatttacacaaaagatttgacagtttcaaaaataatattgcaccaatatttgactttatccttttatctctttttataaaatatgagaataaaagaatacatatgacttgaaaaatatctactacgaagtcatttattttagcggtgaagctagttgtaaaacaagctaaaacaaagaaaatcgtaaacactaaatcttttttttggaatttccaattagataatttataaaaaataaataaatctactattggtgaaattgatccctgtatcgctatcattactttaatccaagaaactttttccaattaaagtgaaacaatgggtgttttgacttattaacaatattattcattgcaaacaaattttgattaaaaaccatattagtaatagcaaatccacctttaacctcaactagctcttcttcattcaactttttcattatttatgcttcctttcaatttaatgcactaacaatttttacactgttaatgttactacgagcgcaactttatgattaaaatcgtcatattctgtaccatttagatcatattctgcattttcaattaaaatgctcctccaccagaaccatttccccaactattcgacttcttcttgaaaaaatagcgtttagattttgatcgtccacccacaatttagacatgaactagatagcttccgcatattttctcttcccttcatttaccattttgttacaaataaaagcataactctatctagcttctcaaaattaagctcatcagattttgcattatcctaatcatattttgctaaaaataatcaatcctctttctcctctggccaaaaaagatcatctaatgtcttatccagcgcctggcaaatcctgatacacaagttaaccgacgggttataattacccttctcaattgcagaaatcgtctgccgcgaaacatccaccttctgcgctaaatcttcttgcgtcaaatccttaccagcccgcgctgctttcattcttaaatttttcactctacatcactttccttatcacgatgaagttggaacaaactcaccgtcccaacaatcagccaatagatttccataatagtcatcgcactattgaaatcattgagatatcccaggatcaagcaaacacctatcgcaatatctacccggctattggccttaatatgttcttcattgaatgcaaaatatgctccatgtagtatatcgtagactgacatcactgctaatgccaacatgataattgaaaaattaaccgcaattccgtgctgagcgtaaaaatctgtctgcatgaagaaaacggagagtacttcgccaacaatcaaaaccaaaaagccgtatctatcaccacgtgcacgaattaattcttggcgctcatcatacttggctgcccgataattccccgcaaaagtaactactaagatgaaagccattactgcaaataaacttgcaaaagccataaattttaacattttacacatccctttctttatgtgcctcattctatgatctatttttagcaatgtcaggtctgttttacattattgatgatttatttactatgcataaaaataatcggtatcattttggcgaatttgataccgattatttgtttatgatactgatttcttctttgttaacaacaaataattttcaaaatttacttgacatcttttttgatcgtcgtattataatgacaattaaattaataaaagcttagaagagatgagtaattacttaagacttctgcagagagtcggagttggtgcaagccgatgtagtcgatagtaacgaatatggtcttggagctattttaaagagcaagctattaagtaagcaatttacgagtgacgatcgttaccccgtccgagtattcccaattttgggagcacttagtaaggagttagttgtgaagctaacttgaatttgggtggtaacacgcttaggcgtccctagcatagaaattctatgctaagggcgctttttattttgcttatttaatttttcagaaaggagccagacaatggataaacctatcaaaactacaagttcacaaatcatcatcagtaaaaaggcattcaaccgaatgtgcactattgtctggttgatcttgatcatcatcggacttttcatcgttaaataaaacatcgaagcaaaactaaggagaaaaattatgacagaattacattacgatatcgttggtagctttttaagacctgcagaattaaaaaaggctcgcgcagaatttgaagaaggaaagattaagcaagaagaattaactcatgttgaaaataaagagatcagagaattagttcaaaaagagattgatcatggtcttaaaatcgtaactgatggtgaatttagaagaagttactggcacctcgatactttctggggctttgggggtattaaacacactaagcaggcccacggctatttcttccatgatgaagaaactcgtaacgactctgcccaagttgaaggtaaaatcaaatttactggtaaacatccagatctttcatcatttgaatacctgaaaaaagttgtcgatgaaactggcgctaacgtaattccacggcaaagtattccagctcccgcacaattttacgcagaacttgttcgtggagaagaaaatattgccgcgcttaaaaagatttatagctcagaagaagatttactcaccgatatttctaaagcataccgagacttaattttagccttatacgatgcaggatgtcgcgacattaaactcgatgactgtacttggggtatgattgtagataagcgctattggaaaagtcatttacaagatgacttttcattagacgaccttaaaagaaaatacttgaagcttaacaatgatgcaatcaaagatttgccaacagatttgcgaatatcaactcatatttgtcgcggtaactatcactcaacttgggcagcccaaggaggttatggtctagtagcggactatgtttttgctaaggaaaatgttgacgccttttatcttgaatttgacaatgatagatctggcagttttgacccaattgcacaaattcctaacgacaaacttgttgtcttaggtttagtaactagtaaaaaagcagaattagaagatccacaaaaattaatcgctagaattaaagaagctgctgaattccacccactaaatagtctcgctttaagcacacagtgtggcttcgcctcaactgaagaaggcaacacgttaaccgaagatgaccagtggcaaaagatcaagttggttgtcgacactgccaagcaagtttggagctaaatggcaattaactagttaaaataaagataaatagatttagacaaaggagaaaaaaatcatgggaaaagttgaaagttttgaattagatcatactaaagttaaggcaccttacgttcgtttaatcactgttgaaaaaggccaaaaaggtgaccagattagcaacttcgatttgcgtttagttcaacctaataagaacgccattcctactggcggcttgcacacgattgaacaccttttagccggtcttttacgtgaccgcatcgacggctacattgactgttcaccatttggctgtcggactggcttccatcttttagtttggggcaccccatcaactactgaagttgccaaggcacttaaggagtcattagaagaaatccgtgacaacattaaatgggaagacgtaccaggaacgacaattgaatcttgtggtaattatcgcgaccactcattattctcagctaagcaatggtcaagagatattttggctgaaggcatttctgatgacccatttgaaagacatgtagttgaataaaattttgactgtataatcaaaaagctgataattcatttttacgtgaattatcagcttttattttgtcaataattattactggaacattcatcataattactccagcaatattaggattgcccaaatccgcttttgccaactgtggagaaaaatcttgcaaaaagtggaagattatacaccaagtcaagccattggtccaaatgtgcaaataactaaaaattaaataccctagtagtgaaactaaaatgtttagcaaccacagcaaaaactgtaacgtacgctactaagataaccgttgccataacgcgctgatttttacccaatagatttaataagactgggtaaagctgataacatagctgaagcactacttccagtatgattaatccaattactgcttttttcacattatccttattatctagttcaacttcatcagctaatgccaaataatacttatctttcataagttcacccattatttttttatatccattgttttatgaaattgaaatagtgatacaacaaaaatccagtcttgatctgtaatcaaaattggattctaaggtatcctgaacctgatcaaagcctttgtggattcgattgaaataacggtcattgtagctcattgcctgaatgccaataaaagtattaagcgactgttcagttggaaactctgctttaggcttagctttacgcttgataacgttgttaaaggattcgatcatattggtagagtaaattgaagccctgatctgcttaggatagctgtaaaagaccagcagatcaggttcaatctctttgagatttctgatgacatggttgtacgctctgttccacttgtcatagaaagcgtgcaagactttgatcgcggcttccttatttggctgttgatgaatttgcttgaattcattcatgatcgtttcgcgatcatctacgcatactttagcgcaaatattgcgcatgacatgaactagacagcgttgaaaatgagctttcggataagtctgctccagcactgtcttcatgcccacaacgccatctgaaagaaagagctaaacttgttctagaccgcgagacttcatgtcttgaagcatttccgtccaattctcgacgttttcgctgggagcaatgcggtaatcgatgacttccttgtgaccattaggcttgatgccaatggcaatatagactgcttcacgctcaaacgtttctcggcgcaaaggaatgtaggtagcgtccaaataaacgcagaagaacttgtcactgagtttgcgctgatgataggcctcgacttttggaatcatctgcttggagatgttagagacctgagctgggctgtaatgactgccatacatcttttcaatcaagtcggctatttctctagtggttacgcctttggaatatagtttgataatcatgctttccaagacattggagtgctgcttgtagtcagggagcgtgtgctgatgaaacatgccgtttcgatccctaggcacctgaatttcaatctcgccaaattgcgtatcaaccttgcgaaaataagcaccattgcgtgaattgcctgtattccagccagctctggcataaggatcatagcctaaaaacgcagtcagttcagcttctaataggtcattaactgcttgctggagttcttctttctgtatgtgtttttttgttcaaaccaatcatacgagaaaggaactcctttttctaatgttttaagaaattaatttaaggaattatccatccttacacaaactattttacagtctcttaattttaactgtgaaaaaatagactatcattgtagaaatataaatatatgtagtcaactctacaaaaattagtccatttttattcattaataagttgtaaatatgacttttgttcataactatcagtagggcaaaaattattccaagaataagtgatagcaaataaacatcattactaaaaaagctaagtctggatccgaaaatagtcataattattgagcaaaataaatcaattaatccaaaaataagtgcagctccccaaaaaagcgtgttagctttactctttctacttattttgaaataaaagaaaatacttaagatttccaacaaatctgacacaaattcatttatatatccatttgcatcccctaaggataaggctacaaataaaatgataagaaaaatatccgcatatttatatttttgtcttgcaacttgataaaagatccataaatcaaataaaggtgatacaacagcttgtgttaataaaagccacattagaacttcctactttagatgtaacatccacttaattaaattgtgtctatgcttacttgtaaagttagtaacacataaaaaactaacagtaggatcagcaaatccacccttaacttcaactaattctttttcatttaacttcttcacttaaacttcccacacgcagaatcgctccttttattgtgattctgcgttttttaacaaatataaaaggcacatgaccttttcattgctataattaaagtgaccaaacgataattctatgcatgaaaggcttgtgccaatgtctattttaccatctcctgaccaaaaaaatgaacaactattttcaaactgtaagtgtcaatgtttttgcggtagcctttaaaccattagtctaaccttaatttcttaaatatttatatgacttaaatttctgcttagcttgcttaaataactattgccagctacctgtgcggttaatgcgccatgctggatgcctaaatgaacttcatgacgcttctttaagctgtcacgggccgctgcttttaattcctgttcagtcaatacagttatttctgaatcttcaaactcgctgctaagccaaaattccagctctcgattcttgatgcagcttaagatcctaagcatgccttctgctccagattttgaccatttcttgccttgccccttaacacggtaggtatacttgcggtggttgctctcgcagcagccaatggctttagtcacagtcagttttcgtttcttaaacggcttaatatcgtcccaatgacgatcaatataattccttaggcgccccagataatcatgattgagctcggtattcaattcatcaattagtcggctttctgcagtggttaggatagttttaactttgtcatagctgtatttgtattccaaagcagaaatcagcttgccttgcaggtcaggcgcaaaatatagcctttctttgattttcttatttaggtgaaagacatccaagaaatgctcatgacgcttgcatagccctacaatgtcatcgaagtctgttttggcatatccagcaccgccatcggcgttgctaagaattacagtatcagaaagatcataagtattggccaggtactccttggcttcgttcagcgcatcaagtcggcttaaagaaacaaattccttggcattgattcgctttctgcgtttcttgcttatattgacaatgccttcacagacctgatagcgatgaaattccaaccggcttttagtgcctttgatcaccacgccatcgccttcaagatacaaaactgggacctttttcttagtgcctgcggcatcatatcttgaatctgcttcttggcccgctttaatatttttcccggccatttttaccaaattgcccacctgcatatggctaatattaaagccagacaggcaattgactgctagagcagtattgcgataagtggcaacgctgcttacttctaagatgtttttgactgctaaaatactgtagcgcttgtatttgtcaaagcccattaattcatccaagggataccttgcttgtttgcctgggcagacatatcttcttctgacatacctaacttcgccaaaagccatattgattgagcgctcattcttcttatcaatctgatagccctgtgctttaaccttggtaatcatttcatcatcaactttagctaaagccaaggccatgatttccttaatcaggtttaagaagaaacagattatttttctttcacgcttaatataattatcttcagactttataatatttgcgatttcagttacaattgaattcataaaagaccagcttctaatgtgttttttgttcttaacatcagactactggtctttttgtttgagctcaagtccaaattcaaaggacttgggcttttttaattatttattcaacttaccgtaaaaaattatacacttagtttcaaactcaatcatcagcttcatcaagaagtttcaggtgatcaagctgttgagaaaatgtggcttccgcaaggaaaaaggcattagcctgttcagcttgtttctttacgttttaagcaatgtctttcgtgaccgcagcttatatatgcagctgaaaacggatcattttaaagaaagcttttctaaaaaatgcttattaccgatttatgcgcaacgtccacgtcaattggctccacttcaccacactgctttctgcgcaaatcattaataatcacttgcgatctttgacttcagaaaaacgggctgattgctttgttgtcgatgattcctacttctctaggaccggcttcaagaaaacagaattagtcgccaaagtttttgaccatgtatcaatgacttacaagaaaggttttcgcatgatgaccctgggctggactgatggagcttctttcatgccaatcaattcggtgttgctgtcctctcacaagctacagaatatgattggcgaaaacaaagtctgtgatcagcgcaccattgctggcaaaagacgcatgcttgcccggactaaaggcacagacgtgatggttaatttaatcgaccaagctatgaaagcaggtcatcaagccaagtacgtgctgtttgacagctggttctcaaatccacatcaaatcgtccagctcaagcaaaggaagctggatgtaattgccatggttaaagttagctccaaaatcaaatatgaatttgaaggagaacgcaaaaacatcaaacagatttatcgtagctgtaaaaagcgacgcgggcgttcgcgctatctgttgtcaattccagtcaaggttggccgccaagacaaagacggtgctaaaattgacgctcggataatttgcgttagaaaccgtgccaatcgtaaagagtggctggctattatttgtaccgacatgtcgcttagcgaagatgaagtcattcgcaattatggcaaacgctgggatattgaagtttttttcaaaacctgcaaaagctacctaaaactaagcacggaatatcatggtctgtcctacgatgccttgactgctcatgtggctatagtctttacccgctatatgctcatgtcagtagccaagcgggacgacgaagatgagcgaaccttaggtgagcttttctattgcatgattgatgagctggcggatattacattcagtcattcacttcagctaatcacaaaagcaatggtggctagcgttgaaaaagtctttcatgccagtgaagcacaaatagcagaattcacggctgactttatcaatcgtttacccaaatacatgcaaaaattgttaaagaaaactagcaaaaatagtatagaagcccaaagctaagcaatatcaaagaattgccagcttatttgatgtgggaagtttaagttcttcataattcaaatcttcctttcaactctttaactttttacatcaccaatattactatgcattcaattttatacacaaagtcgtcatattctgtactattttaatcatattctgcatttttatttaaaaagcacctccaccagaaccatttccataaccatacgaattatttttaaagacgcggcgtctaatttttgatcttccaccaacaactttcttcaagactagaatagatagtttttgcataatttttcctctctttttctcaaaaaatactatagaaaaacatacacccatttggactccaaaaaacatttcatcatattctgcctcatttcaatcatattttgcaaaacatcaagttactcaatatgagacgcttctttcaattttatttaaaagatcactacttcgagtcctccatcttttcggtatcattttagctcatttgataccgctaaattaataatgataccgattaaatactaaaaaagactgacaattcatttttacgtggattatcagcctttttgattactcatgataaatatcttgaaccgccataccccaatatggaatatattccatatatcttttacttgcattcttatcatatggttttattaaatacgcttctaaacttgatgcaattgccttagatacttgagaagcatctttatctgataaattaaaggttttacgaattgaagagttactaatcttcatgtcatttacatatttcaaactagcatcccagtaaattgattcattcttttcagtaatagccaattcactaaatgctttttcctcacgaatagttacttgcgtagcagtggtacccttgcttaaaatttcgaccgttggtaaatgagcctcttctaatgaataaaccactttatcaattccagtaccacgtgattcagtaatatgaaatttacttaagatattagccaattcaggattacgggatcgaggtgggacgtctaaaaatctaagtggttcaatcaaaggaattcctggtgctgtgcttgctggtagtattgatttatcatgtttgaattttttaagacaccattatatacaaatttccagcaccaaaatcagaagatgtcgtcactgctatcttatgccagctaacattgccattcattggttgaggaacttggctctgtatcacctcagaaaaatccttaatttgatgtagattcaactcatttttacgtgaattatcagcttttatttatatctaaatcattcctgcaattaaaccaactacatataagaagacacagcaaactactaaatacaaaccgccccacttcacggtctctttcagtatttcgccttcatcaccttcgcggttaattgaaccagttgccacggcaatattttgcggcgacagcatccctgccgttgcgccagtcatgttcgatgctacaacccagtacttacttacacctaggtccattgcagccgacagttgtaaatttccaaagagaacgttagctgaagtggcagaaccagttaagaatgttcctaatgccccaataagtggtgcaaataatggataagctggtcctaataagctaactaaggccactgctaatgcatcggtcattcctgcatagaccattactttggctaatcctacaattgcacaaaccgtaattgttgtcttccagacgctcttaattacttgtcctaaaatttgcatcattttcttaaaactaacgccctgaattgccccaccgattaaagtagcgacaaaaagcaatgtacctggagacgacaaccagctaattgacaaggtattcggatttttccccgtataaacaaccaaattagttgtcaccttattaagtaaattattaactgctggcaccaatgatgatgcaaaaataacgaagatgaaaactaagataaatggtgaacatgccttgagcatttctttagtacttggtttttctacatcaggttcttcttcctcatcatgccatctagttaataaaatcgtaattgcgattgaacaaagtgccccaacgattgctggcaattctgctccaacaaacttagccgcaattacttgcgggattgccatgcctaaacctgacatcaaggtaattagtccaacgcctttaattgctttaatagaaccttccgttaaaattactaggataaatggcaccagcacaactaaaacaaataattgcaaggtcacgatgaaggataattcttcttgctttaacccagtcacttcacccaaggtaatgatcggcaagccaattgcaccaaaagctgtggccgtggtattaacaatcagactgattactgatgctctaattggctccaagccaaaggcaatcaaaatcccagcggcaatcgccaccgcggttccaaaaccagcaattgattccaaaaagccaccaaagccccaagcgataatcaaaacaataatccgcttgtctgttgaaatcgtcgccagcatatcttgaatggtcttcataccacctgattcggtagtaacattatacgcaaataaggccatcacaattacgaacatgatcggccaaatgcccatgataattccttctagcgccccacttgccgtatctagcaccggtaatttaaaactaaagactgctaacaccatcgtcaaaattaagccaatgacacaagcgcgtgcagctggcattcgcataactcccagcgaaataatcaaccaaacgatcggcaacaatgcgatcgcaaatctaatccacatcaaagtcctccatcatcaaaagtgttgtactatattatttaatcatgatttgggtaaaaagttaaaataagacacaaaattttagttaaaattacaattttcacaaatttcacttgcaagttttaccaacaaactatataacaattaatggaaagtaaaatttctcacatcatgtttgaactactccgtggaatagagtagttctttttttgcgtaaaaaaatagccagaccgaattcagcccaatgtcattaagttaagacattgacaaattatcgacttggacttttaagatcattcatttgcgatttatcgcatttgaatgatcttttttcatgccaaataaacccaaattttgtttagaaattaggctacacgatataaataatatacagctgatttgggtttgagatttcttttgtcttttcgtcctggtctgatcggaattgtgtaatgactaatttgaataagaatctttttaaagatttcagttgaagaagaaattatatacatagcctggatgacaaaacatgactgtttgaaattgatcgcatattgatacttgcagtttttttgtggtacatatgcttgagcatcaatttgactgactgcgttaaacataatcatgtgggcatagatctccatttcaataaatctatcctgcttggaatgaaactgtacgctacctaaagcatatttcaactttttgaatgaagtttcaatgccccagcgcaaatggtagatctctttgatcctttttaagggataatcggctctatttagattagttagaacaacttcccattcttctttgcctgatttaggatcattaattctaaatttacaggcacgaaattttattgtacataactctccaaagtcccagctgccatctttggtatttttagaccgatattttatatattgacggtaatgatggttaaccaaatgaacgttttctgtagccttatgggtttcataataataattagaggtagtcacccagcaagctatatccttatcacactcttgattaggcaactcagctacttccttaaatgcgccatatcccgttttagtacgtatgacataataacagttaggcaggcgattacaattttcaatcatgttaaagccggtataacctcgatccatagtaactatatatggtccgcaatttagctttttaagcatttgaacggcggctttacgttcatccatctttgacttaggctgaaagatgcagtcttgataagtattatttaacaggtcatagagtgcattaacatgaatttggcaatatggctttcctttatgattgagatttccaacgatattctctgatttaggattccagatttgattaaaatcagacccatcaatggcaaatatacgatatttatgatcaaataactggatattaaataaattctgattaaatacagttagaatatgcttaaaacatgcgggtgaaagctgacctttgcgttggacataagcggaagtactgactactttatcgttatttttaatagctttttggccaaaagctctaaacaactcactggtcaaatcttttccttgcatattaatagtagttttaatgactgtagctgcatctaaaaaccgcttcctagtgaaggcatgaggatcatcgataaaatcatgaatatgctttccagtatcattgataatttgatcaagacgatctaaaatatttctgtgaagggctttcataattaacaccagctttctggcaataattttgaaggtttaataatttaatcagagggcgaaaaggtaggttcttttcgcctttattttatgcaaaaaaagaaccaaatcataatgattcggttctacagagattagattcaatttgtcaatgtcttaacttaatgacattggaattcagcctgacttctgtttttttagcgatgtttaattacgtgaataccataagcgattaagtaaattaccacttcgatcgttgcaataaagaaagttaccggccagttggtgataaagccgagatacagtccagcccacacgccaactaaagcgaaaaacacggaccaactgatcattgctggtattgttttaccaatatagcgcgccgttgaagatggcaatgttaatagaatgaagactagcaatgaaccaacaatctgggcaccgatagcaactgacatagccaaggctaccaagaaagcaataccaacccagccagtatgtacaccatgtgcaacggcaccgatatggtcaaatgagtcaaaattcaagcttcgagctaccaaaataattaatagtaaaactagaattgacaaaaccactagctgaatcacgccttgtttatcaacaccgatgatactaccaaacagaatattagtagcgtaacggctatttgatccagaaatggctaagaacagcacacctagcccaataaacagagctgagatcgcactaactgacgattctttttgatcgctgtgcaaggacaattctcctactccaattgaaccgagcaaggtaaatagtagcatccccaataacggtgcaatgccgataaagacggcaaaagctgctccagcaaagccgatttctgacagtgtgtgagctaaaaaagcataactccgtgctactacatatacaccgaccacgccacaggtaatcgcaatgaatgtactagctaagaaggcataacgcataaattcgtattgaaacattattcgaaatcctccttaaatttatccatctttccttgcctgatcgttctcttatttaaatatagataatcagtcatatactttttagctaaaggaatatcatgagtgacaaacaaaacggtaattttgtgttcacgattcaggtgcttgattaatcccatcaattcttccttagcagccggatctaggctagctgttgcttcatctaagatgatcatattgggatgatcaagtagagcctgcgctaaatatgcacgttgtttttgtccacctgatgcctcacccattcgggtattctgaatcttttctaaatgagtttcttctaactgatgatcaatctgttccttaacctttttggtcttaaacaatggggcgttaagtccaataaatgcgcgaatcgacaatggatactccgcatcaatatttctaaactggggtacataacctaacttaacgtctgaatcaaacttaaagttgcccgcagtcggctttaacatccccattaaaatcttaattaaggtggtcttccctgttccattaggtccaagtagtgcagtcattgacccgtcttcaagctgaaaactcaaatcttgaaaaacatctttagtatcaaatctcatcgagagatcatttacttctaaaatcactcttctaccccctccctaagttgctattatttttctattttagccaaattttgataattttctttcatccaagccaagtaagtagtgtggttaggaatagtctcccgcacatttaacactggaatattattttccttagctaattttacaaataacttcacagttgaactgcttgcctgtgtattgttaacaaagaatgcaatcttttttgctttaatttcattattcatttgattaatcatcttaggactcggatcagtaccattctcaattgcttcttcaaagcccttatccccaatcttgtatcctgcttctcttaaagcataatcaaagacaggttcactaacaaagactggcttactatttttcttattagtcttcaccaattgcttaacttgattaatcttagctaaatacttgtcaccattagctttaaaataagctgcatgctttttatcaagcttagataaacgcttaactaggtaattaacatacttggttggcatacttagattgtaccaaatatgcggattatcccccttctttaatcccatcaagtcttcaccaactaagacaggctttttgctaacagaactagctagcttattcatccaagaatcatagcctaagccattagcaacaataatatttgccttggtcaattctttagcatctgccgtagttggttcaaaatcatgaggatcggtactgctattgctaatgattgccttagccgtaccatattttcctacaacatttttagcaatatctgcataaacattggtggtggtaataatcgagacttcacccgaattgctcgtcgaatttgatctattcgagcaagctgaaactaacagcgcaataacgccaattagtcccaaaaaagagattaacttcgtaattttagatttcgcattttgcataaaatatcctccttgtgcaaaataaaaaagcatttaagttagaaaattcagcataaattctaactaaaagttagaataatctagttaattacatatgtcaacatatttttgcatagacaaatagcaccagtctcccataagcctgatgctatcaataatttaagtcataaaattttgctgaattttattaaatgctttgttctaaaattacattattatataaacatatttttatataattgtcaaactaaattaaaattcttccttcacgtgctgacgcaaaacatctaagattttaatcacatgcttatcttctaagctataatagcgctcctgcctaacccgctcgctcttaactagcttagcctcttccaaaatacgcaagtgacgcgaaatagctggctgactaacatcaaactgcttaactaaattattaacactacttttttgattatcatttaaataatataagatttgaattcgaatcggatgattcaacgctctagtaatccgaataatttgctcgtccaatttcttcacccattcatactttttaatttattatagcttaaatttaggtataaaaaaacgctacccttcgggtagcgcaaaacataacagagtatcttgatttaagtagagatcatcaagatatttatattataatacgtttttgccaaaatgtattgttttttgattaataaccagaattatttaataataatattcgatattacttatagtattattcgtttgggtcttctttgacattcttcttccagaaactcatgattaaaccagcaacgattgaaccaataatagtagctaggaagtagaataagatgtggcttggaccaccgatgttaccagcaagtggtgatacccaaagaccaccgtgaggagctgggacaccaacgtgccataaaccaactaaagcaccaccaacagctgaaccaatgatacatgatggaattacacgacctgggtcagcagcagcaaatggaatagcaccttcagtaatgaatgagaagcctaatacccagttagaaacacccgcacgacgttcttctacagtgtacttgttcttgaagaatgtagtaccaattgcagtagcaaatggtggaaccataccacccaccattacagcagccatcaagatagcagcagtagctgagtgagggtcgttagcaaatgcacctgaagcgaagacataagcagccttgttgaaaggaccacccatatcgattgacatcattccggcaaggatagtggtcaaaagtaccagtacccattccgttcaagaaatgagtaatagcaaagttaatgccactaaagattgggttaatgatgtagaacataattgctgcaataaagagcaatcctaaaattggatagaacagcattggcttcataccttcaacagaacgaggtaatttagcaaatactttcttcaaaccaaccatcaagtaaccagcaataaaaccagcagcaataccgcctaagaagccggctggtgaagttgcgtgagcttgaacgttaacttggaattgaccgttaacaatagaggccatgtaaccaccaacaaaacctggcattaaggctggcaaatcaccgattgattcagcgatataggctgccaaaactggaaccatgaaggcaaatgccaagttaccagcattgtttaaaaagatgaaagcaggagtcttagcgccacccatgtagttttctacgatgaatgagatggccattaagataccaccaccaataacgaatggaagcatgtgactaataccattcatcaagttcttgtagatacctgcccacaaacctggcttctcagttgatgaagattcagttgacttgtcttgagcacttgcacggtaaacatcagccttaccacccataatgtcatcaatcaattcgcctggcttgttaattccatcaacaacaggacggttaactaagtgcttaccgtcaaaacgtggcatatcaactttcttatcagaagcgataataacacctttagcacgcttgatttcatcaggagtcaacttatccttaaccccttctgaaccgttagtttcaattctaacttcgatgccgcgcttcttaccttccttaatcaaggcttcttgagccatgtaagtgtgggcaataccgttaatacatgcagtaacaccaacaatcaatggcttgttgtcgtcatcacttgtaccttgagccttagcagcttccttagccttcttagcttcagctgccttcttgtcttcttcgtcttttttagcttcagccttttcaaaaagatcgataacttcttcaggagtcttagtattcttcaaagcttcaactaaatcaggatcaattaacaaacctgaaagttttgctaatgcttgaaggtgagtattgtcagcaccatctggtgcagtaatcatgaagaataagtgaactggttgaccatcaagtgaattatagtcaattccttccttactcttggcgaataatacgcgtgccttgttaatagatttgttacgtgcgtgaggcatcgcaattccgccaccaataccagtagttgattcgttttcacgtgcccagattgacttaataaaagcatcttcgtcgttaacgatatcagttgctacttcaaggtcagccatttctttaatggcatcttctttgttcttagccttaagctccataatcatggagtcagggcttaaaatatccttgattctcatatttttcccctcgttttttattaagaaatttgctcaactttgatttgtggaagaacagcatcaatttggctcttaactgcaatgtccttagtaaaggcagtagcagcaccacaagccattccaattctgaagccttccttaggatcttgggtcttgtagtaagtaccaacgaagccggcaatcattgaatcacctgcaccaactgagttaacagcagtaccaacagcacccttagcatggtaaacatgatccttggtaagaaggaaaccaccttcaccagccatagaaaccatcacattttgagcacccttatctaaaagcttttgtgcgtattcaagcatcacatcacttgaatcaaaagttacgccaaacaagtctgctaattcatggtggttaggcttaattactagtggcttatatgccaaagtatcaagtaaagcttgtccagtagtatcaacaacaaattctgcacctgcttctttaatagtaggaagcaatgattgatagaaatcagttggaaggcttggagtaagagaaccgctcattactacaatgtcgcccttctttaaatcgtttaaacgatccttaaaagcagtgatttcttggtcggtaatgttaggaccagccgcgttaatttcagtttccttttcagcgtggatcttaacattcacacgagtgttatctgaaatagtaacgaaatcactttcaattctcttttgattcaattgacgaaccaattccttaccagtgaagccacctacgaagccccatgccgtattatcaacatttaattggttaaggatttgagaaacgttaattcccttaccccctgctaaaaatgaatcattgttagttctgttaacttctccgcggttaactttttctaattgaagaacatagtcaagcgctggattaacagttactgtataaatcatcctattttgcctcctctaattcaataccgactggtaatgaccgtttttgacctggttttagttgatcagttaccacaatcacgtcacttgtattggcaaacacagcaaagttacgctcaccgattttactattatcagttaatacataagcgtgtcttgcctgtttgatttcggctgccttaaccgcagcttcctctggatcaggtgtagttagattgccatttttttcaattccattagcaccaacgaagctagctgaaaaattcattgccttaatctgacttaaggcggtctgacctataacagcatgcgtatcgtccttaacttcaccgccaattagaattgtgttaattccgtgatttaaactgcataaagcagtctctacaccattagtaataatcttgacgttagcaacctctgctaaaaatggtaccatctcataagttgttgttcctgcatcaatgaagacattgtcacctggacgaacaaaattctgcacggcatatctagcaatagtgatttttgcgtcataattcaaactgaagcgaacgttttgtgatacatcacgagaaaaatgtttaactgattgggcaccgccatgaacacgcttaaggatcccatttttttccatctgaattagatctcgacggatagttgattcagatgttgcggttaagtcacataattcacttacgcgacataactcgtgttgattaacatagtcttcgattaagctttggcgctcctgagtcagcatcatttctcacctcgataaatattgtattcgctttctcctccaaaatcaatcatttttcttcaaaaaatgtcatttttatttattatcgttcaataacattcatttatatgcaaaaaagatgccgttttttgattgaaacgacatcttttcttcgtcatttggaattattcttagtcgttttaccctatttgactaagaatccgtaaagatgactaagaaagagaaccaaagatctattaaccttgcaaaagcaaaacacgctgaatcattattgattcagcgcgttttactattaaatatattttgtctagcctctcaagctacgcttaaagttttgccatgggccgacatcatctgtttgcaaaatcaagtttggatagatttttctaatccagataaatgacgctactgtagcggctaaagcaattaaagcagagatagctgcctctaaattagttgcgttacccataattactctagctggcattacaaatgatgatagaaacgggatgtacgataatactttagcaaaaatcgtatccccacctgattgcatattgactgtgaacaagaacccgatcaacatcaatgtagatagtggtcccaccgctttgttggcattctcgcttttagcaaccaaagcgccacagaaagctgcaaagataataaacaataccaagccgattatcgtaaacaccaatccccaagaagccagattgccaattgcttgatcaatcatcggcttatactgtctaaataaatcgctaaagccatcgatgtatggggccgcgcaataaactgccacaaaaccaacaacataaattaacacttgggtgataatttcaccaaaaatacctaaaatcttcccagtgaaataatcgccacctggcatactcgaaaagattacttccattatcttggtacccttctccgtagcgatatcttgtgctgttacttgcgtataagtgatcacaagcatgtacaagataatcagcaaaacccagaaggaaatttgcttaacaggatcattatcaaagctcttcttatcaacatgcttaacttgttgcttaaattgcgctcgcgtagctaaagactgagtctgttttgtcgttagcttggccttacttaaattcaattgttgctgggcggtgtttaggctagttagcagctctgattttagatcactgtccattttttcatcactatagtaagttgcagctaattgattattcttttgttcaattaaaacatagccatcgatatcttcatctttatacgcctttttagccttagcttcagtgctatagttgtcaaagtcttctgactttttaattgcttgctttaaggcagaattagaagtaactaccccgacatagttgtcatcactgccgccagctgataccattccgataacaaatgaaaagaagacgagcagaaacggtgctaaaatcatcagcaaatatgaccaagttttcacttctctacggtaggtttcttttgcgacaagccagatcttattcatgacgcgcacctgctttcattttgaaaatctcgtctaaagttggaggttcctggtcaaaagtctggatatattgaccggccgaaagttggttaaaaatatccttaccatatttttcgtctgcaagaataagcagcttcattccattgttttgcaaaattatatcttttacacctggtaaggctgataattcagtagcacttttgtctgtcctgacaaaaattcgagttaggccaaagctgttcttaatttcatttactgggccattcaagacgatatgcccatcattgatcattacgacgtcatcgcacaattcttccacgttacgcatatcatgatcagaaaaaatgatcgtagcgccttttcttttttcttccaaaatcagctgcttcattagatcaacattaacaggatctagtccactgaatggttcatctaaaataatcaatttaggttgatgaattaaagttgcaatcatctgtactttttgttggttacctttagacaaagacttaatcttatccatggggatccctttaacagccaaacgtgataaccaatcaggcaattcttcttttacctttttagccggcatccctttaaggctagccaaaaacactacctgatctgaaatagttaacttaggcatcaaacttcgctcttcaggcagatagccaatattgtcataatctttagcgttgaaagaatgtccatcaatactaatctggccgtcataatcaacgaatttcaaaatactatgaaagatcgtcgacttacccgacccatttttaccaaccagtccaagaatacgcccatctgacacactgaagctaacatcaaacaaaacctgtgttgacccgaagcttttatttaggtgttctatttttaacataatttttcctcaactttttatctaatggttattagacctagaagtacaccgtcaaagaactgccataaagtatcggttgaaaaaattgtttttacaatatcaactgacccccaattggttactaaagtaatcactacaccagctgaagcaaccactactcctgtaccaataacttgaggggcaagtttcaacactttcttctgccatggaatctttgatgcgaccgttttattaaggactaagcttgcggacatgatgccaccaaacattagaccgaaagccaatccggctccaatcgacataataatttgaaaaggttgaggcgaaccagcagtcttaacatacatcatcacaagagctaatattggtccaacaagtgctccaattcccatgccttcaataattcgtttgttttcacgagcaaatttttcattattcattgttcttacctcaaggaaattttcagctaattaaacaaatccgaaaacttagtcggaatgttgttcttggcgaagtatttcttgaatgcatccccaaaactcaattgatctttttctctattttcaagcaaatcatgaacagctaagaatgctgtaacggcgtaattaacggctaaaatgattaacaaaccgagcacaatataaattaagtacagcattgttctttcctccaattcagcgattatctcccaggaaataatcttttatccttttaaattaatcatatccccatcatttatgtaaaaggtaaaaccgtccaattctgtcatttttcggactgattttgcattttattcttcatcttttttataaactaataaatcccctggttgacaatccaagacttcacagatcttgctcaacgtgtcgaagcgaacgccatgcgcctttcctgtcttcagaatcgacaggttagccggcgttataccaactttctctgccaactcctttgaagacatctttcgcttcaagagcataaaatctagtgtcacttcaatcatctatatcaacctttctaaataatcgagtctgcatcctcctgaaccttcattccgtacttgaataccaagtagactacgtatagtactgctaggaaaagcaaaccagttgtcacaccacttgggtatagtacattattcgaggatttagcgaaccaagtgcggtgagttatgaaaataatgtaatctattattgaaataagggtatatccagcaactgaaattaataatttcttgagtaaattcaaattactatcagcaaagtaaacttcttgcttgatattcttaacaattaatctggcatatcgacagattaaaaaggctgcaacgctcatcatgatcagtgatagcaacacaaccactattgcaccgatatagttatcaactgatacgccttttatacccctaccactttcaaagccagcacgaaaatccggattatgtataccaaataacacaacacctcccataacgatccacataattattcctatcacacaaaatatttggtaaatccaagcaaaaatcgtaagcaaattcaaaattaattttttcatttttctatcctctcaaaatatggatgattctgtatatagcactgccaattacacccgttactccaattactaataatgtaattctaagaacactccatgttccgcctaagttagcaaacactaagattgccatcattatcagcattccaataattgaacctatctgtcttttcttttctggaagcatatctatccctctcttccataaaactatctatctctttctcgtcttttataattattgtattacgataatttataattgcaatacagaaataaaatatttttttgagataataaaaaaataccaaattagtcgttaaactaacttggtattatgttttatcttccaagctactgctttttacttttcttcttatagtaagagttcatgaaaatattcataaagataacaaaggctacactttcaactatattccaaaatactgttccaaagcttaatgttttgtactgaaaatagtcccataccaatcctattaacagggccaaaataccagcgatgatacttctgtttctaacttggcgctcggttaaaattttatttttcataatttttaccccattattatcatatcgaaaaataggaaatctattaaccgaattttctattttttaatattatctatgtttatgttttttatgtctattttgtttggcgaaatctttaacagcgccttctacacatccttttatcataccacttccgctagggagcgcatcaatgaaacccgataaacatgatccacctacaccaagccagttagtgccaccacttactttttctaattctttataattcatttctttcatcataaaagttacctccttttttacaaatgtgatacacaagaaactgatccgctaataatacccacattagcaccaaatatagctccacctactgtaccaattggagtaccaaatgcagtgcctgcaatgccatattttagtccatccttcaacgctcccattccaatagctttagcacaatttgtgatttttctacggcgtcttgctttaccaccgttaccaccgaaaacagctgacagttcttcataagttaaagtttcaaatttgttcatgtttttcccctttataaaacttctaattacaattttcataagtgaattaagttttacctctcttcaacttacacactaataatacaaaacaatttaccttcattggcgtataataccgatttagcacgaaacaagatctatttggaaaatatttaccaaatcggccaagttttcgtatattagtaatttacaaaggattcttattaattgttacgctaacttgatattctgttttataaatccgaaaactagtaaaaacatagacacaatgcacttattatgagaatggctaacaaaaaaatcttctcatagccaaggctacaagaagattgccatcacattaatgcataaactgatacgcacgctctttactttaataaaacatgatcaattatacgactataacatagccactcaaaaccaaaaacttgagtcgaaatcaaataatcatttttagcatagtaacctacgaaaaaaatcacaagtttcataggtttctttgcgttatcttctaagtattacgatattttctattggagatatttttagcctattcgcaccagtatttttttcaatacttatctactagttattatctacctctatgaaaagaactttggaaaaacttaggattttccaaataaacgtctcgtttatgattaccacctttcttactgtataaaggtagcatgtgttcagtatcagttagaccaatatcatctacagaacctgacccacctaaaattccgcttaaaagtacttcatctttagaaataatgattcgtttcatctacttttcctccttagttttctttcctaatgaaatgcccaaaactaaactgattaagatactaatcattccaattaattgaccccagatattatccttctcacctgtagatggtaaagactgagtagaaccatttttaatagtgtcattttccaatcgctttaacttagtaattctattttgattgttcttaacggcactataaggcttgctttgcacttttactgaatcaaattgtttattttctttcacacttccgtgtttttcactaactgctgctagaataatattctttttatgcgatttagctgttttcttgaccttagtggctacgattttaggttttactggcttcttcacagttttcttcttagtttcagctctaggagccgcatactcttgattacctgtcgtaactttagtcagatctgcagtagagctagcaacatttgcagcattctcaaatacgctattttcaacaaagtcagtaatagcaacgtcattgctagactgtgtttgatcatcttcagctacagtcacttcaggtatttcattactttcagattcagtagtattatcatccttcggttgatccttaattactgcctgttccactaatttattagctgcatcagaatacaaaaagttatataactcttgtcccgtcttttctccaccgacccatgcactaataatttttccattaataaatctcattgtagttggagtacctggaataccaatttctttgaaggcatactcatgtgctccttcttcagcatcaatattgaaataaagcagcttacctttaacgatttcattgaaatcttttaaatcaggtgaaaattgtcgacagtagtaacatgttggacgaccgatatacataagatgttcttgattatttttctctgctagaagatcttttacttcttgcatttttactctatgaaaatcttttacattgttctcataatcttcaacagatacctcatcttcatcatcttcactatcttcctcatttgcattattaggatcttgattattagtattctgtgactgattattttgatcttcagaagctgctggctcttcttcctgcttattttgagtttgagctgcttcgttcttactactagttttctgctcagattcggaaacatttttatcatcattttctgttttagatactacttcacttttattctcttgagaagtattaccttcatccgcatgcacaatagtactattcatcatcaataatactgctgggctcaacattaacattaatatttttttcttattcatagatcttcctccgtattttttataactaagaaaaatatatcaattatcagctatctttttggttatcagacttattcagtacactttttgaccaaatcagttatcaaaataattggaatttgattctaactaaaaaagagcttttcagctccttttaattttggttaagaattttatccttaaaatattcaaaatatgtactcttacctgtaataatagttgcgttgccttccatcccatatttcaaatttttcttggacttggccttacagattacttcatagacattatttccgcgtagattaatgggatatactccaatttctttcacttttcctactaatctatccattgttccactagcattagctacctgaaaatacagtgtttggcctttttttattgccccaattttattacctgggaaataagtaactacattgaccgttcttttagccttaatcatcggaaacaagtgaactgtattctcctgtttatcatcaagatgaactagccatttttctctatttcttctaacaatttgtccttcatgatagtttctattggcaatattaagtgtattttgtggttctacaattccggtagatgtaactgtactttgtctagttgcaaagaaagaaccgactattaagatcagaactaaaattgccataggaataataatcatagttgaaaaattcttgaatttataggaatagtattcggtactctcatagtctttattattcataacgttgctcctaattctcaactaagttatagtaaaagccatgtttctgcattaatttctcatgacttccttgctcaacaatttgaccatgatctacaaccacaatattgttagtcctttgtgcaattgctaaacgatgagcaataaaaataatcgttttatcttttaatttcattaaattatctactacttttttctctgtaatcgtatcaagcccgctagtggcttcatcaaaaattaaaattttagccggtgacaataatgcacgtgcaatagttagcctttgcttttgcccaccggataaaatcttggcattttcatccatcttggtttcaaactgcagtggtaattgttcgatttcagactcaatttctgctatctgacaggctttcaatatatctttttctgtaatatctggtcgactacctaagagcagattttctttgattgttcctgagaagatgtatggtgtttggggaacatagtttacgtatgaccgtaagacatgcttatctactttagtagaattaaatccattaaaagttaacttgcctttgcttggagagaagaaatcaactaaaagtttgaccatagtagacttacctgagccactcatccctacgattgccaacttatcattgggttcgatttttaaattaatatctttcccggatttaaaattgaagtgcaacactaagtgttaaacaaaaaggccatgaagacctaaacttgaagtgacgaaaaatcaagaaaggaagatcttcatgaccaattcaaattctagcatttctaagcactatcatcaattaaccagcgtacaacgtggacaaattcaagcaatgctggattccggcataacttcccgtactgttatcgctcaagaagttggctgccataagtcgacaatcagtcgcgaaatcaaacgcggaagcgtcctgcaaagagacagcagctatttattgtatgagcactattacgctgatactgcacagatttattatgagaagcgtcgcaaaaactgctatcagcgcaatccattgaagcattatgctgtctttttgagaatgctctccagacgctttaaagctaaatttgatgccaccagcatcgatgagttcgttggtgaattcaaaaggactatgccaggctacccttgtcccagcacaccaaccgtctatcgctatattgatcagggcttgctggacataagcaatattgatctgcctatgaagctcaaaagacgcaggaacaagcgtcatcacagccatggcggtcacgctttgcacaagaagcatcttggcaattccattgaacagcgtcctaaagagattgaagacagaaaagctccgctgcactgggaaggagatctggttaaaggcgtcagacgcaagaatcagcctgctttaatgactttgactgaaagaaccacacgctttgaagtagttatcaagattcctgactatcgggcaagcacatgccaaaggctgcttcaaaaggagattgacagacatcctgcctggtttaaatcaatcacgtttgacaatggctctgagtttgcggatatgaccaagatcaagggctgccagatttactttgctcacccatattctccatgggaaaggggcaccaatgagaactgcaatggtcttttgcgtcaattcttccctaagggcaagagcatgaaagacaagtcaaaagcttatgttcaacaggcaactgatgccattaaccacaaatatcgccgaatcctccaatatcacacagcagaggaactcttcaagcaatatatctcttcataacctaactgttgcacttaatttgacaattcaggaattaatatcttttaatacatcgactccatagccataatgatagtcaacatgatgatattcaatctcacctgctaattgcttggcatccctaatctgagcatctttctggaactcactcttaaccatgtatacttcattcaatcgattttgtgctacattagctgattgtagagttggttgaagattaataatgctctgaagtggatctacaaaatacgatagtaatgcgttgaaggtcattaattgaccaatgctcatctgcccgttcattacaaccttagcccctacccagaggataattacattgagagataactgaatgaaggtctttaaagctgactgcaaagattcagttttactgtaacgaaaagatttcttgaggtaatcgacgaattgactatcaatcttacgataacgtgtttgttcgctatttaaagctttgattgtttcaattccttgaatatcttcaattactgaagaacttaagacagcattactctccatctgatcattattcatcttttcaaatttcttagaaaagctaagaatcaccactgcataaattggcaaagacagtagagtaatcacaaatagagtggaattttgaattgccaaaactattcccatcacaattacaattgaaagatcaagaaataatgaaataactgtactggcgagtgcgtcaataattcgactagcatcagagaaccttgaggtaatttcccctgttctacgagttacgaagaattccattggtaattcaaaaatatggcgaatgtattgtaagttaagatcaatacttaatcgctgacctagaacatccaatagaaaattttgcccgtaagaaaagatagagttgaaaacatatgctatcaataaaccaatagctaggatcgacaaagtttggtatgtaccgctaggaatataagtatcaattaagccttgcaagaagtatgagctacaaatactaatgattgtcatcaaaagagcagccaaaataatattagtgactagtttcttttgtttgaacatgtatggaaatagtgaccacagattttgctttttctctttgagtggctcaaaatcatcatttgggaccataaaaagggcaattcccgtccattcttgagaaaacttttctttagacattttcgttaaaccaacgctaggatccggatcagcaatcactaaataatttttggttgccttaatcacaacataatagtggagtaattcgccttgctttaagacgtgtacgatgaaaggatattgaatgtctgcatcaggatcaaacaaggacatgtcagctttaactgcttcagtttttagattaaatgcttgtgctgttttaactaagcccagagcggtagtcccttctaaattagtgcgggctgaatgacgtaaatgggctaaaaatactctagaatgatattttttaagaatcatagctaagcatgcaactccacaatctgattcgtctacttgtggtacataaattgatttatactgtagtaacatcttttccactcctcatattaagttgaatccattatttcatgattggaaaactaaatgtaaaaaaataccaaatcggttattctcattaccgattcggtattttagttttctaactagattgagctactcaactttaatattttcaaatttatctacaagctttttaaccacggctttatacgatctagaataagttaccatctgaccattatcaaatataataatgcgttccttcgtgtcaattgcactaatgttcttaggatttaccaaagaagattgcgaaacttttgccaagaatgggttttctttatcaatctgagtaatatttgccttatactcaacttctccattctcagtaaccatatgtactttatgctgtgtagtactgtgttcaatgaaaagtatatcgccttcggccactttacatacgcgccgaccaatcttataagtaaagtcacgttgactaaacttaattctgttagataaattatcgaaggcgttacgtaacgtttcttcgatacgttgaataatcttatcagacgacatagacttactaatataatcaattgcaccgatacgacggcgatacgttaatggagcgtacttatcgtacgccgttacgaagatgatctgggcattttcgtcattcttcttgatgaattcagctaaatctacgccattcttagctttagactctcgacttaattcaatatctaagaagtagataccattcttaatatcatttgtgactatgtatcctaccgcttgagcaaaatcgttagcaacaaacgtaacagattcatttaattcagcgtaaccttcattatcatctattaagtcttgaatagatgcattgatattcttagcaatctgattagctaaatctttatcgtcatcgcatacaatgattgggaacttactcatcctcttcaccatcttccgtatcaattgtcatataaaagtcgaaccagccgtcttgaattgtataagaaatagacatatcaggatatttactctcaatttccttaatattagctaatccaagccctttatggtctttcttagtagtaaagccacgttgttgaatttgactagttgagatatttttattttggattttatttctgatttcgaactcaaattcatctgggtcatcagaatagaccattatttggacttcagcacttcgaatatcatgcttttcggcaatcaatgctttactttcctcaattgcattatcgaaagtaatgccaataatacgtactagatcgagttcatctacatggtctggtaaattacggatattatttcgacattcaaaattatatggtatatccaaattatacaattctgttatctttggaataataatgctcttaattgatttaacgtaaatgtgatttaggtctttatatttaagtaaggctttagaatttaggttagtttcagtatatttatctagtttctgaattacttcttgaacgttaccttcttgcgcacttacctttaaagaattaagaatatttttgtaatcatgtctgaaggcgcgaagatcatcttcacttttttcaagataagaagcatattcttcaagctgatgctgctgttgctttaatttttcttgatcctttttatttaaaagtttttcttgtaccatcgtcatttcatgatatataaatatagcaaaaatagtttggataagaatatagagagaaaagaacaaagttaatggtgtaaaagatttgctttgaatatatatgatagagatgctcaccgtagaaacataggtataagctaatatgcctacgaaaattttattattttggtttgctagataattatatatttttccattacctagttttattgcaactatcatcattagtattagtaagaaacgtagtgataattggcctatcaaagtaaatgacataacctgagtgatcatatcagacacaatatcaactaataaatctaatgtgcatactaatattattgaaccaaatagtatttctaatgtattattttttctcaaatataatacaaaaagcaaagtttcaagtatatttgtgaagattacgccaatattacctatagacaataacaaccctaaaaaaatattagcaatacacaaaaatagaatctgtctctttttagatcttactcttgatattttaaaaaaacaccatacatctgctaaactagaaaaaacattaagaaaaagaaataagactatcttttccatatattattccaaagttttttactcaagaaattaaaaccaacatgtgccgtgcttccaccaacaaccttagtcaattcttcttccttcaaaacagtctttttaacattttgcttcttcatgatatttcatcctttcatgattttatactcaacttgtttacacctttaatatatcatgtacttttaagtaaattaaaaaagataccaattcagtcatactttcgtaccgatccggtttcatatttcttcaaacgtaaacaactgacaattaattttcttagctaattcctgacagctatccgtaaagccagatttggaaaatagataataatgcttaagtggatacttgaagatttcactatttgtaatcaatttttctaacacactacgagagatcggttcattcttccatttacattcgccgaaatatccatcacgttcatcgtcagagaatcctacaatatctaactcaacttgttgatgtgttctcttatcggttccccaccaattgcccaagtggataaacggattaggaacaattttttcattcatatcctgagaccacatgaagtcttgactgtatttttcaaactcaggtcccatgaaatcagatagacccttttgtacttttacccaagcaagatcagttaagccacgctcaattagatcggtttgcttgcccacaaaggtataccagaagcggaacatcccgtcacagatacgataaacgatatttttgcttttactcttcttttgctcagtaaccggtaactttttctcaacaatacctaaatctatcaaattattcaggtacgtggttagcggaccagtttgtaagtgggcggattgcgcaattttactatgcttagaagcacctgaagctatcgcattgataatcgaattatagttagttggatcgcgtaattcctgttgtaacaagttattaggctcatcaaataagcgacctgatttactcaaaaagtttttcttaatattatccgcaactgacatgctgtctgacatataactcaaatattggggtacaccgccacaaaccgtattgatgataaaagcgtcctctttactgagttttggtaacatttcatgtgcttctgataatttaaatggttcaagctttaaggctaaagtgcgacgaccatatagtggactttggtagcctaagacttgtcgttccataaatgacatcgatgaaccacataaaatcaaaaataggttagtttctttgaattcatgatcaatgtaggattgcaacattgaactaattgtagggtaagccttagccaaataaggaaattcgtcaataactaaaattacacgttgtttttgagctaggtgtgtaatttctttaaagcattcctcaaaatttgcaaatttttcttttccaccctgatctgtatttttaaaaatactaattgcatcagaaaaacgttttagattatcttccgcattttcttcaagtgctacataataaattgactttttatcttttaaaaactcattgatcagtgaagtctttccaattcttcttcgaccatagatcactgtaaattgaaaatcattttcttgatacgcctgattcaattgctctaattcttgatgtctacctacaaacatagcgcactccttttcactacatcgtaatatactacattatattatactataacacgatatagtataacgtaatgtacgtgtattctatttttgtaataaaaatggccgttacttagagaaatagcgaagatcattaaattttaacatgctataataacaatagaacaagaataaaaagttttagcgtgcgcgttgaggtagctcctcaacttagtcattaacgtgtggctctgctttggcaaagcttttttgttatgttaataccctacaaaaaagaccgtgcatccctgcacggtcttttcatcttatcacatctattttctaacgtattcgccgttcttgtacttaaattcaatcttcttgttaggcaattgaaccgtaattctgcgatatacaggaccgaagccgtgcttttcaagcttaactttcacgctaccgtccttgtttaccttaaccttgtacaagttgtattcgcccttttggtacttaaagtcagttccgttatcttgatagtgaacgtacttaccctttttaccaaatagtctaaaggtcatactctcgtctggttcaccagagatgtggctaacttctttaccccatggcaagatagtgttcttcttgataaacagtggcaacttgccaattggtgcatcaaccaaaatcgtggtctttccagcatgttcaacaccattccagaaatcaatccattttccttttggcaaatatacggcacgcttggtttgaccttcttgaacaactggggctgccaaaatgtcctcgcctaccatatattcatcattcaagttatacacctgtggatcattttcataattaaggacaagtggacgcataattggcaaacctgtcttagtttcacgatagaattcatcgtaaagatatggaatgaaacggtaacgcagcttcaagtacttacggtaaattgacaaggttggttcgccaaatatccatggttcttgtgagcgagttcctagagccgcatggtttctgtacaatggactaaacaatgcgccttcgatccaacgagtcaacaattcaggtgttgtgtcagcaccaaagccaccgatatcagtaccggcaaagctgaatccactcatacctaagttacataattgtggaatcatcatttggacatgtgtccataaactttggttgtcaccagtccaaactgtggaaaacttttgcgttcctgcatatgctgcacgcgtaatgacaaatgggcgttttccactgaatttcttcaaaccttcataagttgccttagccatgttatgaccatagacattgtgcatcttcttatgagttgaagcttcttcttcattatggaagacgatattttgtggaatttcacccttgaaggatgcaggttcattcatatcgtcccagatacctgaaacaccaaggtcaactaagtacttgcagttcttagcccaccacttacgtacttctttgcggccaaagtctgggaagactgaatcgccaggccaaacttggtttacataaacagtgccatctggagcctttacgaagtagcccttttcgataccttccttgtagatcttatagtcatcatctttcttaacgccagggtcaataatcgtgattattctgaagcccaatttacgcatcttagctacgaatttctctggtgactcatagttatcttttctccaggtaaatactctgtagccgcgcatataatcgatatccaggtgtaaaacgtcacatggtaagtcatacttacgcaagttttcagcaatcttctcaacttgcttttgactgacactgtagccccaacgtgattgttgatagcccaaagtccacttttgtggcattggtacacgaccagttaaataagtgtagttagtaataacttccttgagtgagtcaccaccgatgatgtagtagtcaatattgccatcaaccgctgagtagtagtaatagtcattactttccttacctaagtcgatgtggttgcgataagtattgtcaaaaaagataccgtaaggatgaccattttttaatcctaataaaattggaatcgacttatacaaacgggtaaagctctctacttgcggatcaggattgtcagtattccaattatcataagcatagtggcgtttgttcaaatagccggttttatcacccaagccataaaattcttcgtcatctgctagtgacttgaccacttcataataatcggcgtcatgctttcccagtaatttatccacatcatggccttcagattcagccagcttcaaatgttcctcatccatctgtcggtcaattggggttcttttcccccgataatctacgaccaatggattgccttgttcatcaaagacgtcaattttttcatcatcataagcttttactatcaacttagccgtagctatttcaatatgatcgcctttatttttaactgtaaaatcagttttaatttctttatcgccttcgatagcataagaattgctagcattacctcgatcttgaaagaatcgcataatttccggtgttaacacggtcaaaatcattggtccattctcatagtttaaggtaattttttgtccatctttagtaaaatcagtaagttgattaatcataatttacctctaaaaaatcaaaagttatgtattcgctttcaattttaacacaataagctaatcaattgggtcataccagaaaaaacaccttcagaaatttttgtatttaaatacaaaaaaactgccttacggcagttttatttaatttattccattggaaaaatcttatctggattcaaaacataatttggatcaaaaacatgcttgatctttctcaaaagttcagtgtaatcatgaccatagaaatcctcaaaccaatctttgcaggcataaccaataccatgctcgccagacatatttccatccaaagctttagctgtcttataaagttcggtaatcacataatgactcttttgctcaaactcttcgtcactcattgcatctgagcaaagataaatatgtaaattaccatcgccggcatgaccaaagttaggaattcgcataccaacctcttgttccaattcatcaactctatgcaaaacatcaggaatatgattaattggcacacaaatatcaacttcatccatctttggcgtagacttttgaatagccaaaagcaatgcttcccgacaagtccaaatcttctttgcttcctctgaattagcatctaaaattaccgcatcagctgctttaaacttcttcgttgctgcaagggcaagctttaattccgcatccaattcctctttagttaaagaatcaagccctagaataatgaagccatcgccatttgcaatcgggaatttttcatcgtaatacttttcccagagactaatgacttttctacccataaattcaacggttgttggcactacaccagaagccaaaattgctggtactgatttaattgctttatccaaattaggaaacggaataattgcattgatcgattgtttaggacgtggatataaacgcatggtaacttcagttactacacctaaagtcccttctgagccaatgatcaggtcttttaacgaataacctgatgaggacttaactgccttagcgccaaatttgtaaagtttaccatcagttaaaacaaccttcaattcgcggatatgttctcgagtaacgccatatttaattgctttcaacccaccggcgttagtatccacattaccaccaattgtagcccaatgcattgctggagctggcatataagtaaatggtttattggctaaatattcttcaatatctttcaaccgaatacctgcttgcacagtcatcgttagactttctggctcgtattccaaaaccttattcattttcaccatatccagtgaaatgccaccttcaacggttaaattgccacccattagaccagtcgaattaccacgcggaacgataggaatatgatgatcgcttgcatatttaacaacgttttcgacttcttcattagtttcaggttgaattaccaagtaaggcattgctctaaccgtcttaaattggtcatgatcccaatgaacagttggcttagtaatgaatcgctctggatctgagataaatttactcaaattatctatatctgttgcagttaattttttaaagtccatctttgacacttctttccaaattgaaacatcctatattaactaatgtatccgcttttgtaagcggtgtcaaaaacaagaactgaagatttttttatctaaaaaagcaaatttccatactacctcactttaaaatgcgatagtatcgactttcatttaaataactattacacaaaatatgaaaataaaaaaactgccttacgacagtttctagttaaataaatccgacatcttagttggaatattattgtttttcacaaaatactttttaaaagtaggtaaatctgcattttcttttttcacatacatatcatgtaaagcccaaaatgcagtgattaacaaattaacgcccaagacaattaacataccgattaaaatatatactaagtaaagcattgatctatcccccgctatatcgtcacttgacccagagtcgcatcttcaatgaagtatctgacgaaagcttgattgaagctcatgccctggccgttgtaaacatgccactcttcgcgtttggcacctacagttctaatgattgaaattactgtgcaaattaccaaatatgcgattagcacgttaaaaattattttcattaccagcatgtctacacttcctctctgtactactcaactaatacactaatatttattagtcaatttgtcaacatcttttagtatttacttttttctccccaggtataaaaagccatagatagctggtccgatcactaccgccccagctatagaaactataatcactgcaataaagcgaggcatagcaaaaaattccgagctaaatttcatacaggcccaggccccaaagaaaaaaatcgcccagccaattaaaattgaaattagcatatttaaacctgaaaatttaggtttagagtttttattgttcatcaagttttctctttcataaaaatattgtgccacaaattgaaggtcaataaacaaaagtgacagattcggtcgttttttagacttatttggtaaaaaataagggagattaagtaaaatatggcgcttaatctcccttttgaatcaataattatttgcccataagacctgaaaaagccattcctaaggcagcaccaccacatgcacctgctttagctgatacgggacgagcataactagtaattgcataatgaaacttcatcacatcatgtgacaatttaccctgccagcttaatggatcaagaccaactcgaattaagttgcagacataattagctgattcaccattttctaactcatgctttgcatcaagtaggatttttctttcttctggcttagtatcttcatttactagtaggtcagtaatattacttaatagccattgttttaaatcatctttattttcttgatacatttttatccctctttttcgactttttcattaatatcaggatgcatccctacaaccattttagaatctttcatgttcttcatcgattcatttattttaataaaaaactctgcaagtagcagagctttttacctcattgcagagttacttatacatatacttagcacatgcttttttagaatccataccattacgaatcttcaaagctaattcaatcgatacatccgcaataattgattgtgggtcaatcacattgtaaggatgatctggtgccttttcctgagctaacgacaattctgtacatcccagcaagattacgttgcagccataatcatcatgcattttttgcaagatctggtggtacaatttaccatcaaccattcccttttctttaatatcggaataaatgagcttattaaccatcggttgaatttccggaccacctaattctgcctcacggtgaaccgcatgaatttcatccacatacaaatgatcatagattgacccttcagtcgcaatcaagccaattttcttttcttgtgggtatttttcaataaattgatgcactgctattctcatcatgtgtaaaaatggaatatcagtcaatgcagccaaatcatcataaaaatagtgagcggtattgcatggcatcacatagaagtctggtcccaatttggcttggcccagaacatcgtcacgtaaatcatagaaaaagtttggtttagtatgatctttaatataagccgttctatcaggaatttgtgcatcattaaccaaaatataatttaaataatcttggtccttagctatttttacacggtgattaattaaacgaacgtagctttctgtggcaatagttcccatgccgccaataatactaaagaagtgtttcactattttcacttactttctaaagtgttcttcttgaccttccaactcattaattacctgctgtgcaaccacaatatcagatggatatggggtatttactccgcgaattttttggaaagcgtcagcccccttaccacagattagcacaacatcatctggcgtagccatggcaatcgcatcatgaatggccttcttacgatctaactcaatagtaacgtcgcacttagagtgatctattcctgaatcaatttcttcggcaatactctttggatcttcaaagcctggatcgtctgtagttaaaaatgctttatctgcgtatgcagtcaaactttcactaaaaccgggacgacgtgacacgcctttatcaccaggagctccaacaacaacaataattttaggatcgttgaattcgttacgcataaatctcattaaagccatcattgaggccttattatgagcgtagtcaactacaaccatgccgtgcttctttgttctctcggtttgcatccggcctggaatagtaacatcgcgaatacccttcgcacattgatcatggttaagtccagccaagcctgctccaataattgcggcagtaccatttgactcgttgaaatcacccagcatctttaaagtataatcaccattaattggtaatttacgtgccttatcactagcacaaactaaattgaaccgagtttctttcatatctaattgttcagaagagaatctgaaatcaattggctgcttcaagtctggattttcaaaattatcgcgggcaaacaaataaatactatcggggttggtagtagttgttgcggcagcgtagacttcatcaaagtgtgcagtttcagcgttgataatacatttacgtgagttaacaagcaattgtaatttgcagtgcaaataatctgcaaaattagggtgttcgttaggaccaatatggtctggactaatattcaggaaaaagcctaaatcataagttaaaccgaagacacgatttttcttatatgcttgactagaaacttccattaccaagtgagtcatgccattatcaacagccgttctcatgtctcggaataagtccaaactctctggtgtggtcaagcttgacttaaagctatcttcaggcttaggaccgaccacatcattaactgaagaaatcagagctgtcttaccaccatttgcttgatcaagcatccctttcaaaaagtatgctgatgtagtctttccctttgtaccagtgaaagctacaacaaacaagtcatcttgtggaaaacggaagaaagcagctgacaaaagagccattgccttagaaacatcgcgcacaattaaagcgtgcattccttttccttctggatatggttgttcagctacataacaaatggccccattgtctttagccattgacaaataagttggtctaaagcctgctcccttgcagaagaacaatgtattagtttgaatatcgcgtgagtcataagacacatagtccattttagtagctactgtatcttgcactgcgcttgacttgagcaagtgatgctcttttaagatcaatatacaggtatttaaggaaatactcattaacttttctcctcgttgtatttaaaacatttcagtcaaaattataacacagctagtgtgttggtgacgctttcttcggatcaagtggcaaacgaataataaaactagtccacttttcgtttgattcacagcgaattgtaccatggtgtaaatcaaccacacctttggtgatagataatcccagaccagttccgcctgtcttagtatttcgcgaagtttctacccggtaaaaacgctcaaagattttatttaatgatttcttcggaattggtgccccattattttcaacgcgcaactctacttcacgtttgttgactaaattggctaccaatttaattttagttgcccctgtaccatacttgaaagcattagaaatcaaattattgtaaacgcggaccagcttttccgcatcagccttaatcgttagattctttggccgcgcttcaatctctatttcaatgccatttttttctgcttctaattcaaagccggccgctacctgctccaacattgaataaatatgcaaatcattcagatttaacttagtattggtcgactttaaagtagtatattcaaacagatcgttagccagtgctttcatttgttctgccttagtataggcaatattgacatactttttctgatcttctggcgaagtcactcctgcttttaacaaaccaagataaccaataattgatgttagcggcgttctgatatcgtgcgaaacattagtgatcaattcatccttagattgctcaattgcccgttcttcattaatcgaatttacagtactatcaaccaacgaattaatcgaatccactactcgttgcaattctggtcgtacccgaaaattaatccgatgatcaaaatgaccattagcaatatagtgaagttccaaaataatgtgacgtagctgcatttggtgatagcgtcgaatcaagcgccagtacaaaacaaccaagtcgcccactcccattaagacgatgaatacgttttgccaggaccagagatgatagccacctgcaaaagtgatcgtcttttttagaaagtagattccgttgaccaggctttcatcctgcaaaatagctaagtgaatcagaatgataattgataaatttaataaaaacagaaggacgaccgttacgaccccttctgcaaacaattcgctcttttcggcgccagttagcttgacgcgttcttttttcatcttatgcctcgaccttgtaacctacgccccaaacagtttggatgacatcctcaccatcagtggctttttgaattttatcacgaaggtgtgacacgtgtaccatgacagttttagctgaaacaattgattcttgttgccaaacacgttcaaagatttcatcagctgaaaaaacacggttagggtgactagcaagtaagtataagataccgaattctaaggcagttaattggatagtcttaccatcaatagtcttaacttcatgtgaatcacggttaattaccaatggtcctacttccaaaatatctggtttttcattcttaacttgcttttgacttcttctcaaaagtgaacgtacacgagccattacttcaagtggattgaatggcttagaaacatagtcatcagcaccagtgattaagccttgaatcttgtccatatcaccggttttagcagaaacaataataattggaatatcggagtcttttctaacttccttaattacatcgattcctgacatatttggcatcatcacatccaaaatcatcaaaacgatatctggcgtagtggtcaatttagtaattgcttccttaccactatatgccgcaacaggttcatatccttcatttttaaggtagatacttaatagttctacgatttctttgtcatcatcaacaactaaaattttcacgaggaatgttcccccttcttgtttattattctctgtttttctatctacagtttagcagatatcatatagaatattttacacattttagaaaaatatactgctttcattatcctttttaaacaaaagctaaaaaaatacacgtttctccatcatgaaaaacgtgtattcattctatttactttaccttatcatcatgcaatttagtttcgacataaacgcagacgataaatagcaaagcaaaacagcagatcttaggtgctgttgcataatcaagcatgctagcaaaaccgaataagataccatctggaacaacccaccaggagccgatcgaagaattaaaggtatcactaactgtcgcaaagaatgcaattaaaatcgttaaaacaagtaaaactgaagttaagatcattcccggccgaccaaaatctttaaaaccatgatcccagtagactatcactccaagcagtaccaataagattgataccagccatagactaccctttttcataataaaggccttctttctgcccttatcctaacacgattaagtagcagctgccttgtttaacgcttattgaatttccttcttgccagtgtagagttcatagtagtaacccttttgcttgattaattcatcatggttaccatgttcaataatatgaccatgatcaagtaccaagattaaatctgagttaacaatcgttgacagacggtgagcaataacaaaactagttctaccagtaagcaagttgtccatcccggcttgaaccattttttcagttcgagtatcaatacttgaggtagcttcatcaagaatcattactggctcatcagcaatcattgcccgcgcaattgacaacagctgtatttgcccttgtgaaaggtcgccgccatcaccatcaatcacagtttcataaccgtgatcaaggtcatggataaattcatctgcgtgtgataacttggctgcttgataaacatcgtcatcactggcatctggattaccaaagcggatattgtccataattgtgccagtaaagagatgggtttcctgtaaaacaattgaaagtgattttctcaaatcatcttttttaatgtttttaattggaataccgtcataagtaatcgttcctgaatcaatatcgtagaaacggttaagcatgttagagatggttgtcttacctgcaccggtttcaccaactaaagctaccttcattcccggtttggcattaatggaaatgtcatgcaagatttgatgatctggtacgtagctaaagttaacatgatcaaaaataatatgaccacgaacttgaaccttcttggttgagccatctttttgtggtacattccagtaccacttactgccgacttcatcgtttttcttagaaagagtaactgtaccttggtcagcttctgacttttgatcttccaagttgaaaattctttctgcaccagctaaagccattacaatagagtttaattgttgcgaaatttgggcaattggcatactgaattgcttagataactgtaagaatgaaccaatggcaccaagtgaaagcggagcccaactattaattgcagcagcaccaccaacaaaggcgatcaaaacgtaaagcaagttacccatgttacccataattgggaataaaattgtagcgtaagtgttagccttacctgaggcttgacgcaactcatcattatatttgtcaaagccttccttagattgtggctcatggctgaagaccttgatgaccttcaaaccattaagcatttcttcattataaccattgatttggcccagcttcttttgttggacttggaagaagtgacttgatctaaccgttaagtagcgcacaattccaaatgataaagcaaaaataatgaaggagaacacagtcaattgccaactaagtgaaaacatagcaactactacaaataataaactcaaagctgagttagtaaattgtggaattgactgtgaaatcatctgcatcaaggtatcaatatcgttagtataacgcgacatgatatcaccaaattcattttggtcaaagtatgaaattggcaagctttccatgtgaacaaacatttcgttacgtacacgatattgcactttttgagctaaaacacccatcagcatgttaaaaaggtaattagacaaaaaaccaatcgcatagatcccaaacattaccgcaattgcagtagctagagggccatagttaggaactttttctttagttaaaggcacaatataattattgatcaaacgttcaatgaataacgagccaataacgttgctggcagctgctagcacaatagtgatcatggaaacgatgagcatccatggacttgtactattaaccagtttcaataggcgcaataagattttggttctgctaccctttgtttgatttttacttttttccattgcttgatccaaattgctcacctactttccttgttcttcctggaatttagcgattgaactataaagttcgttagtcttcatcaattcatcgtgggttccgatagcttgaatttgaccatgatccatgacgataatccgatcagcatccttaattgaaacaattctttgtgaaataatgattttagtagtttctggcatatctttagccaaagacgttctaatttgtcgctcagtactggtatcaacagctgaagtggagtcatctaagatcaagatcttcggattcttaagcaaggctctggcaatagtaattctttgcttttgcccaccagaaacgttgttaccaccttgttccaccattgtgtcataaccatctggcatttcacgaataaagccatcagcatgggcgattttagcagcggcaattacttgttcatcggttgcattttcgttaccccacttgaggttatccttaatcgttcctgtgaacagcacattcttttgtaaaaccatcgcaacgttatcacgcaaggtcttcaagtcatatgacttaacgttgtgtcctgcaacccgaacggcaccagaagtaacatcataaagacgcggaatcattgaaaccaaggttgacttcgatgaacctgtttcaccaataatcccgattgtttcacctggcctaatgtgcaaattgatatcttttaaagcatcagccttgtccgcaggttcgtacttaaagctaacgtgatcaaagataatttcaccattggtcaaacgtttcaatggcttcttaggatcttcaattgttggttcttccgtaatcactgaccactggcacctgagataaccaattgcgtagtaatcatagctaaaatgtttaaactaaacaaaactgagtttgaataagtaaacattgaaattaattgaccagtttgtaaactaccgccaaccacttcttttgcatcgaaccagcagattgacagcgttgaaatattcaaaacagctgcaactactaatgcgttcaaagacataatcttttgtgcagtcgcaaacaacttgtaaataaagcctgatgacttcttgaattctttaatctgcggttgttcttggacataggtcttaacttcacgaataccacgtacgttttcacgcacaacctggttcattcggtcataccctctaaaaatcttaggaaagtatggataagctgttttaataatcaaacccaaagcaattgcaaaaaccggtcctaaaactgcaaagattaatgataaacgcggactaataataattgacataataattaaaacgatgaacatcattggtgctctaacagcaattctgatgatcatttgatatgccatttgcacgttgttaacgtcagtagtcaaacgtgtaactaaactggcacttgaaaagtgatcaatattttcaaaagaatagtcctgcatatggtagaacatgtcttggcgcaagtttgcggcaaaaccagcagctgcatgagctgagacataactcgcactagcgcctaaaattagcgaaataacggttaacactaatagcaatagccccattttactaatataggacatatcccccttcataattccgttatcaatcaaaattccgaccaaatatggaatcagcatttcaatgataacttcaccaataacaaacattggtgagagcaaagacaattttttatattgcctaattgatttgctcaatgttttgatcatagagacccacccttctattcttttattcaatctcgcaaataaaaagataaatggatcatctcccaatgtcattaagttaagacattgacaaattgaatctaatctctgtagaaccgaatcattatgatttggttctttttttgcataaaataaaggcgaaaagaacctaccttttcgccctctgattaaattattaaaccttcaaaattattgccagaaagctggtgttaattatgaaagcccttcacagaaatattttagatcgtcttgatcaaattatcaatgatactggaaagcatattcatgattttatcgatgatcctcatgccttcactaggaagcggtttttagatgcagctacagtcattaaaactactattaatatgcaaggaaaagatttgaccagtgagttgtttagagcttttggccaaaaagctattaaaaataacgataaagtagtcagtacttccgcttatgtccaacgcaaaggtcagctttcacccgcatgttttaagcatattctaactgtatttaatcagaatttatttaatatccagttatttgatcataaatatcgtatatttgccattgatgggtctgattttaatcaaatctggaatcctaaatcagagaatatcgttggaaatctcaatcataaaggaaagccatattgccaaattcatgttaatgcactctatgacctgttaaataatacttatcaagactgcatctttcagcctaagtcaaagatggatgaacgtaaagccgccgttcaaatgcttaaaaagctaaattgcggaccatatatagttactatggatcgaggttataccggctttaacatgattgaaaattgtaatcgcctgcctaactgttattatgtcatacgtactaaaacgggatatggcgcatttaaggaagtagctgagttgcctaatcaagagtgtgataaggatatagcttgctgggtgactacctctaattattattatgaaacccataaggctacagaaaacgttcatttggttaaccatcattaccgtcaatatataaaatatcggtctaaaaataccaaagatggcagctgggactttggagagttatgtacaataaaatttcgtgcctgtaaatttagaattaatgatcctaaatcaggcaaagaagaatgggaagttgttctaactaatctaaatagagccgattatcccttaaaaaggatcaaagagatctaccatttgcgctggggcattgaaacttcattcaaaaagttgaaatatgctttaggtagcgtacagtttcattccaagcaggatagatttattgaaatggagatctatgcccacatgattatgtttaacgcagtcagtcaaattgatgctcaagcatatgtaccacaaaaaaactgcaagtatcaatatgcgatcaatttcaaacagtcatgttttgtcatccaggctatgtatataatttcttcttcaactgaaatctttaaaaagattcttattcaaattagtcattacacaattccgatcagaccaggacgaaaagacaaaagaaatctcaaacccaaatcagctgtatattatttatatcgtgtagcctaatttctaaacaaaatttgggtttatttggcatgaaaaaagatcattcaaatgcgataaatcgcaaatgaatgatcttaaaagtccaagtcgataatttgtcaatgtcttaacttaatgacattggatcatctccatttatcttttttatctatattaagtttaagtatgtgcttatttttacggaaattcaattaacatgcttgcaaaacaggtaaattatttatgttgttgtggccttggtgcaaatgcggaaccaacaatattgtagtgctttctgaataaataacgtacaccataggcagccgccgcgataacgatgtcagctactgctggtaaaactgggttgattacgcgcaatgctgggatttgcaaaatccacatccagacaaacaaaacaactgctatagccaacattcttaagatcagcttaaccaatgaaggacgtttaccttgctgaggcattagccaatcattgtatttaaccatgaagatccccattaaaatacctacactggcaattgtcagaatccccatttgtgaattatacggttggttcttagtttggaataatgcaaggataccacataaaccaacaaaaattgctaaataaagcaatgcgccatcaaccatcaactgccaagttggtgtagccactggctttttcttaggatgaagcatttgttcagccttaattgctggtgaagccaggtaaagcccattggctggttgcccatgacgttgggcaataataatttcactgagcaagccattagtcatcgcaactgcatcagcacgtgacattgaaccttgtttttgcagttctttttctagacgaaaaacatagtcactgttcttgttactcaacttttcacgcaaagcttttggatcttcctgcttaattttttcatcctgagtatcaagctcagcttgcttctttaatttagcttgtttttcagtgttaatttttgtttgatcttgttctctctttgtctcttcagccattcttactcctagacgttaaatctaaattcaataatgtcaccgtcttgaacttcgtaatctttaccttcaagacgcagcttaccagcttctttaaccttttgcatagtttcaagcttgtctaaatcatcaaatgaaacaacttcagctcgaataaaaccacgctcaaagtctgagtgaataacaccagcaacttgtggagctttcatccctttgtggaaagtccaggcacgggtttcaggaccaccggcagtaaagaaagttctaaggcctaagatatgatatgcagcacgaatcaaacgatccaagcctgattcttctacgccttccatctcaaggaattctttcttttcatcatcagccataccagcgatttcttcttcagttgcagcagaaatacctaagcattctgcaccttcgctttcggcatgcttcttaacgatttggtaatacttgtcgctttctggatcagccattgaatcttcagcgatgttagcaacgtagataactggcttggaagttaacaagaacaagcccttaacaatcttttgttcatcttcattaaagtcaattgaacgggcagcattaccttcttcaagtactggctgcaatttattcaaaacagccatttcagccttggcttccttatcgccttgttgagcaaccttctttaccttattgattctgcggttaacagcatcgaggtccgcaatagcaagttccaagttaatagtattaatatcttcttctggatcaaccttaccagtaactgaggtaatattgtcatcatcaaaggcacgaacaacgtgaacgatggcatcagtttgacggatgttttcaaggaacttgttaccaagaccttcaccttttgaagcacccttaaccaatccagcaatatctgtaaattcaaaagttgtgtgcacaatcttcttagcaggaatcaattcttgaattcttgccaaacgcttgtcaggaacttcaaccattccgacatttggttcaatggtggcaaatggatagttagccatttcggcaccagccttagtaatcgcattaaacaaagttgacttaccaacgtttggtaaaccaacaataccagcagttaatgacatttgttgtcctctttttctaaaatcaattttttatttttacttacttgtctattttatccaaaatttggccgagcgatacgatcttttggcacatattgctctttttttgcattaaccggatcattcgccttagttaatagcttttttagcttccggttaaactcgctgcgcggcatcatgactatgtgcccacaacccatacattttaatttgatatcagcacccatgcgcaggatttcccaatcattagtctgacaagcatgaggctttttcatttgaactgtatcagccaaattataaacaatttctttagccatctaaatcaacacctaacaaatcaagaatgcggttcaattcttcagtcgaagcaaaatcaatcgataaatgacccttacctttttgtgtttccgaaatattaacactagagccaaacttgttagctaattggctttcactagcgcggataaaagcagactttttagcagttttcttgctgcgtggcttcttagcattcagttcattgacaaccgcttcaactttacgaaccggcatcccttccttgactactcgcttagccagcgcatcaatcttttccttatctttcaaacttaaaagcgttctagcttgtcccatcgacagttcaccatgttggagtaaacgcttagtcttgctaggtaaagtgagcaaacgcaaataattagcaatatatggtcgcgacttgcccatccgcttcgaaacttcttcttgcgttaagccaagattcttctgcagcatttcataagcttgcgcctcttcaagtggagttaaatcttcacgctgcaagttttctagaactgccacttccatcatttggctttcgttaaacttgcgaataattgctggaatagtcttcttcttagccaatttagaagcacggaaacgacgctcaccagcaatgatctcatatccattaactgattcgcgcacgataattggctggaaaacaccattttccttaatagaatccgacagttcttttaagctcttatcatcaaatctttttctaggctgataaggattcggccgaatatcgcccaaatcgagttcttggacttcttctgcctcttgaacttgaggctcatcctcaaataaggcttcaagaccacgacctaggccgcccttttttcttggctctttacttcttgagtctcttgtcatgagcttttaacacctcttttgctaaatcatcatataccttggcaccacgagattttggtgcatattctgtaattggctgaccataacttggggcctcagctaatttagtaattcgaggaatgatggtcttataaactttcttgctaaagtaggactgcacttctttaaccacttcagcacccaagttagttctggcatcaagcattgttaacaaaacgccttctacgccaagatctttattaaaatgcttttggactaaacgaattgtgttcaaaagttggctaagtccttccatagcataatattcactctgaactggaatcaaaattgaatcagatgcagtaaaagcattaattgaaagttgccctaatgatggcggacagtcaataaaaacaaaatcgtattgatcgctaattgcatctaaagctgactttaagcgtgtctcccgagccatcattgaaattaattccgtttcagcaccggacaagttgattgtggctggaaccatatctagctttggcgttgaagtatggtgaatagtatcttgaataggaatttcgtcaatcaaaacattgtaaatgtcctggtcaatctctgatttttcaattcctaaaccagaggtagcgttaccttgtggatcaatatccacaattaaaacgcgataaccacggtcggcaattgaggctgctaaattaatggtcgtagtggttttacctacgccacctttttggtttgcaaccgaaattacatttaccatattgttcatccttccctattacttccttttcaattcaattgtgatcttataatcatccggatctttattttctgttactttgactttaattcctgagtcttcggctaacttaaccgccttcttaatggtgttaatttgtacctttaagtctttaggaactcggctaacgacccgcttagcttcttttttagccttaggcttagggttaaagtaaacatccacatcttgcacaatctcttcagtttgtttaacgtttaagccttttgcttcaatttctgtcaaaacgcgatcttgatctgcattacttaagccgatcattgcacgaccatgacgagcggtaattttgccagcaatcaaagcttgctgcacattatcatccagcttcaataagcgcaatttgttagccacataagattgagacttacccatatttttagccaaagcagtttgagtcaaatcatttaattccattaaattagtataagcttttgcctcatcaattggatttaagtcttcacgctgtaagttctcaatcaaggctaatgaagcagcttgatcatcactcatatttttgacgatcgcaggaatagtctgccagcccaagcttttagctgcacgataacgtctttcacctgcaataatctcatattgctcgtcatcgccatcttcacgaactacgataggttggagcaagccatccttatcaagtgtttcagctaattctttaattgaatcatcagaaaattcacgccgtggttgatagcggttaggaaaaatcttgctcaattcaagatcttgaacctgtttattcttaggaatttcatcatcatgatgcataaaagaaaataatgacataatatacccctttctgtttaatgaatcggtttgcgccgcggggtgcctgcttgacgtggatactttttaggtgttgctttgactttttgaactaagattagagttcgttcttcttcgctctcaggtagagtcaattcttcttccttaatcagcttaccgcccagcaattcaagagctttttgaccatcatccaattcatcttcggcttttggtcccttgagggcaataaagtaaccatcttttttcaccaaaggcaagcaatattcactcaaaacactcatccgcgcaaccgcacgagcagtaacgagatcgaacttttctcgataaagcttattttgaccaacgtcttcagcgcggccatgaactaattcgacgtctttcaagtctaacttagtaattaagttctttaaaaaagtcaatcgttttgccaaagaatcaacaatggtaatcttcaattctggctgcaaaatcttgagcggaattgatggaaaaccagcaccagcaccaacatcacaaagagtggcaccatctttaaaaacatcgccaaaagtaaacagcggcgtaatactgtcataaaagtgcttaaggtaaacctcatcttcttcggtaattcgtgtcaaattgacatgctcattaacttcgatcaaataattaaaatatattttaaattgttcaatttgttggtcagttaatttaaaattgtgttttgatagttctaaaataaatttttcaggattcatttttcacccgtgaaaccgtgtttcacacctctaaatttaacgcaaaatgcattgattagtaaagatatttcatcttatcaattatgaagtatttttactcaatcgtcaaagttttgcctcccgcaaaatagggtataataaggcgcaaaggagttaaaaatatgattgttactttaattgttttagcttacttagcatataaaacatatttaggctataaaacaggctttacacgctatatcatcggtttaatctgttccgccattgtctttatggttgccattttcatgcaaaatccatttggtaattggctatacacacaatacactggagaaatgattaagactaactccactaacaacgtggaattaatgattgcacgctttgtcgctttctttattgttttcttcgtgggcaaaatgatcatgaagattgtcaaaagctggattcctaacaaaaatccacatgcgactaacttaggcagtattctcgacaatgtcttgggtgctctagcctccctaattgctagttattttgttgtttatgtagttttgtccatgttcaatgcactacaaaatccatggtttatgcagcaaacaattgattctagctttttgaggtttatcatttacaacacaccggggctttcaaacggtgtcttcaataatatctttaatattggcaaaactgtgggataaaatatatcaaaaaagatctgcttgtatcatactgagcagatctttattgatatgttttaactaaattaatactacatttatgaaccaacattcgatatacttattagcgcaggaagttttatgagcggcggctggttctcccccccggaggtgaggcctatgggctacattgatgaaagggttccagccatgtcggtttacgagagtatctccttgatgcttttgttcggtacatttttgttggctttgctgacatatattgaccaccaccaaaaataaaaaacgccgctcaaacatactttggccagttattgagtagcgtttaacgtaaaatttaacatttgaagccgccgctcttaaagcgggctgcttggagtccctaggactcctttttctttagtcattatagcatatttcactaatcaccgaaattatcatattcaatatgttcatcattataaacaaagattgcaccaattcgatcagggttatcatgccaaccctttagtggcttgccagcaaagaataatcgtttgcattcaatttctgcttcaaccgatgttttggtaaaagtagtcacaccagctaaatcagtctttacaggatacccggttctaggatcaatcaaatgatgatactttttaccgttaactactaagtagcgctcatatgtcccactagtaacggctgagcattcaggcaccataactgacgtaatattgtcgcctcgcggctgtttaggatcttgcacaccaattgaccactggccactaattcttttaggcgaatcaccaactaacaagatattaccgcccagattaataattcctgcttcaacgccatatgcacgccacaagtcacgaattcggtcggcaatccaacccttagcaattccacctaggtccagctccatgcccttcattttaagaaaaacagattggtcactgtcatttaaaaccaccttaaatgggtcagttaacagcattctatctttaatttcttcatctttaggaacatgtgcgcctttaaaaccgatatgccaaagcttaacaactggtccaatcagagcattaaagccaaaattctcacggctcttttctactgccaatttaaccaaaccatacacagcactagagacctgtaccggatgttctccagcagcatgattgatatccattacttcagattcatctcgattaacggtaaaaatatcttcgtaatgatcaattaaatcaaatgatttttgcaatagatcacgattttgagtaccaaaaatctgcaatgtaattgaagttcctaaagcatgatgatcaccaaccacctgctctaatgctaaatctttaatcataattatttctcttccaaatataaatcacgcaacgcctcacgtagttctgtcgttacgccaattttttcttgtaaaaagttatcgaaactaccaaaattctgctcaatagcgattaatgaagtatccaaaaaagcatcagaaactgaacctaaaattcgcatattagcgcgaaaacaaagattctcgccctcttcttgcatttttttatctcttttggcccgatagttattaagcatataatttgagtacaaatagtcctgtctaattgtttccatatctacgccaagcagatataacaagactacagttaccaatccagttctgtcttttccttctgaacaatgataaagtacagcacctttttcagtattggccaacagctctaaaattttatgcaagctatgttgagcgtgttctttcaatacatgtgacttgtaacgctcacacatcattctaaagccagcatactgatcttgacgataagttgcgaatacttgggttaagtctttcttaccgcctttggtgttgtcatcaacagaaattggaatacagaaatgctctacgccagggattttgctgtctggacaatggtcacattcagttggtgaacgcaaatcaataatcttagtcaagccataattgagcaaaaactcttgatcatgtctcgttatgttgctaatcttgcccgttcttaataaccgatgcatcttgaccttacgtccctgatagccaacatatccgcctaaatcacgcggattacaaactttttctaatggcaaaatatttggtttcattaatttcatctctttattaagtattttgataaaaaagccggatagtgtccctatccggtaattttactatcacgtggtaagtcacgcaaaattatttgttagcttgttcaacaaatttaataaagttagccatcatagcatctagttacttaatataatcttcattggtcaaatcgccagtttctttatcaaaattgcttgcagcaccgccaattaagatttcattgcctggcaaaacattggcactcatgtctggtgaaagcaagatttcacgagcatcttcttgcgcacgactagatccttgaataccgtatgaagtaccaacaactgcagccggcttcatcttcatcacattaggaccagcatgtgaacctaaccattcaagcgcactctttaaggcagctggaattgagtgatcatattctggtgtagccaaaattacaccatccgcattcttaacatcctcgatccacttcttagtaacatcatctggctcatcagttctacagaaaggcttaagttgatcgatttctttaacttcaatatcagcttgctcaccataacgcttagcaataaattttgctaaaaaacgattgaaagaaaatggagcgtttgtaccaacaattgctaaaattttcatttaaataagccccctacttagtaagttgtgcataccaatcatcaacttcatcaaagaagtgattcaaaaacttaagtgtacctgcatcggtcaagtcgcctttatcatcaaattgttttggtgccaaacccatcataaattcgtcaccagcaaagacatgagcactaaaaccaggtgcgcccaaaatgctcttcaagcgagtttgcgaacgagacgcaccttgaggcattggtgaagttgacacaataactactggcttatcatggaatgggtgaacagaactagaaagccattcaagtgcactctttaaggcacttgaaaccgagtgttgctgttctggtgaagcgatcaaaaccatatctgcatcagcaatttttttacctaaagctaatacgctagcaggagcatcaacgccttctttatacataggcaagcccttaacagtcgcaaagtcaaaatcatacttatcgcctaagtccttaataatgactttaagtaatttttcgttaaatgagttatcggcattggagcccgataaagctaataccttcataaaaaccacctttcaaaaatcctcttaattatcattatagactaatgtagtttaatttatgtcattttaattttaataacaacaagaaaaaacgccttcgataatgaaggcgccctctactgaatgaaaagcacaaatgattggtgaaatttctatgccaagttatccttaagcgaagcttcttcgtcggcagcaaacattgggttttcttgagtttcgctgagacgattgttaagcatagcatcgtggatttgagcattcaacacattgacgatttgagtttggctgaagcttgcaatctcattaacaatcaatgcagccatacctgtagtagaaatccagttagcaattacgatgtcatgaatcttttgatcatcataatcaacatcaggatattgttccttgaacttttcagttccaagttccatcaaagtgtcagcaatgatcttgctaccaaacttgccatcaacgaacattgctctaaacaagttaacatgagcttgagcaaaatcaatgtatgacaaatccaagtcaattaaaggttcaccaacgtacttttgttgtaaagtatgagttctcaagtcattagagattcttctcaaaacttgattgcgaagatcatccatgttgttaaattctagatacaaaggttgggttgagaagtgtcctgctttagcaatgctacgagcagtcaaaccttcaataccatccttgattgccatcttgtaggctgtatctaaaattttgtctttactaatttctttttttcttgccattttaatgcacctcaatcattgtataaaacatgtgcttttcaatacacttgttttcttttcttcatcactataatatatccaaaaaaataacaattgcaagtcttatacactaacttattaaaaaatattatcatcgcttaaatagcgatgagccgttgtctcctgtaaattgatcataatgtgaagaagccatttcaataactgcttgcttgtccaatccttgtgcagcacaaaacgaaaagaatgcagcagataaaatatagccgcgttcacgatcatctgtcaggttatctgagaacttcatattaatcgaatgatttgcataatccgttgtcaattcaatcgatttattttctggtttactactcattctattgcaacctcttttttgttctaaaacaaataaaattaaaaattcccggatttaaaattgaagtgcaacactaagtgttaaacaaaaaggccatgaagacctaaacttgaagtgacgaaaaatcaagaaaggaagatcttcatgaccaattcaaattctagcatttctaagcactatcatcaattaaccagcgtacaacgtggacaaattcaagcaatgctggattccggcataacttcccgtactgttatcgctcaagaagttggctgccataagtcgacaatcagtcgcgaaatcaaatgcggaagcgtcctgcaaagagacagcagctatttattgtatgagcactattacgctgatactgcacagatttattatgagaagcgtcgcaaaaactgctatcagcgcaatccattgaagcattatgctgtctttttgagaatgctctccagacgctttaaagctaaatttgatgccaccagcatcgatgagttcgttggtgaattcaaaaggactatgccaggctacccttgtcccagcacaccaaccgtctatcgctatattgatcagggcttgctggacataagcaatattgatctgcctatgaagctcaaaagacgcaggaacaagcgtcatcacagccatggcggtcacgctttgcacaagaagcatcttggcaattccattgaacagcgtcctaaggaggttgaagacagaaaagctccgctgcactgggaaggagatctggttaaaggcgtcagacgcaagaatcagcctgctttaatgactttgactgaaagaaccacacgctttgaagtagttatcaagattcctgactatcgggcaagcacatgccaaaggctgcttcaaaaggagattgacagacatcctgcctggtttaaatcaatcacgtttgacaatggctctgagtttgcggatatgaccaagatcaaaggctgccagatttactttgctcacccatattctccatgggaaaggggcaccaatgagaactgcaatggtcttttgcgtcaattcttccctaagggcaagagcatgaaagacaagtcaaaagcttatgttcaacaggcaactgatgccattaaccacaaatatcgccgaatcctccaatatcacacagcagaggaactcttcaagcaatatatctcttcataacctaactgttgcacttaatttgacaattcaggaaaattaaaaatttaaaaatttctattataattatattacaaaatcaaaagaattagaaagcgtgtttttatcaatgaaagtttcaacttggcgctcatcatgcacctcaattttaatcgggaaaaaggcctctctttctggcagtatcatcatcggtcgtaatgaagatgctaagactgcttggcctaagcatttagcctttaatccacatcgagataatgtacagaaaaaccattttaaatccaaagacaataagtttgaaatggatttaccaacagctagctactcttattcttcaaccccagaatggacagataagtacggagtgttcgaagaagacggaattaatgaatatcatgtagcaatgagcgccaccgaaagtgcctacgcaaatgaccgagttttagctgttgacccctttgatactgacaaaggaatcttagaagaagcaatggtcaccgtagttttaccttatgttaaatccgcacgtgaaggcgttcagcgcttaggagaaattgtagaaaaatatggtgcagcagaagctgacggaattctctttggcgatcgtgatgaagcctggtacatggaaatcggttctggccatcattgggttgcacaacgaatcccagatgattcctacgctattgtcgccaatcaactagctattcaagaaattgattttgccagtgacgacttcatgtattctcaagacctgcaaaaatttgtctacgacaataaactctggcctaaaaatcagccattcatttggcgtgatatttttggcactcatgacgatagtgacttacactacaacacaccacgagtatggagcggtcaacgtctgcttactccatctgtagcacaagaacccgaaagctttaacctgccatttattcgcaagcctgatgcaccaatttctgcgcaagacgctcaacgcgttttaagcgatcactacaacaacaccgcctatgatttaaccaatcagaaaaacagaaataataccactttcagacctatctctgtggctactactcaggaatcacacttgcttgagttaaacggtgaaaacatgattcactggctagctatgggtgtggctgcgcaaagtgtttatgtgccattctatcctcaaggcactaaggtaccaaatacctggaaaaatggaaaagaaacctactcaccaaattcagcttactgggtctttaaactggctagcgtcctggttgatcgtaattggggtaagtacggcaccgctttaagcaatacgcaaagtactactaacgaaaaattgcttcaaattagacagcaatatgatcaaaaattagcacaagaaaaggatcaagaacaacaaattaaattagtggatgaagccaatgccaaattagctaaaactgctactgatgcttataaagaattgatcgctaaactaatcaccgaacaaactggtgactcaccgttgcgtttccaaatggatcctaacttataaacaaaaatgcctcaatgaggcattttttcttactattttttcttagtcattaagccgtccatcatttcataaatatggtcggcgtatttttctagccgcggatcatgcgttactagaataacggccttgtcacgctttttcgctaaatctttaaacaattgtcctacttcttccacattttgcgtatctagcgaagcagtcggctcatcggctaacaaaatatctgggttagcatataaggccgtcgcgattgctactcgctgctgttgcccaccagataattcatttggatacttattaaccagcttttcaatccctagctgcttgagtaagccttgcaatttatcttgcgacaaattattttgcttttttactttatcaatcaaagtaaattgctctttaactgtcaaaaatggaactaaattataagcttgtaaaacaaagccaattttattcaagcgtagttctccactttgcttagcagaaaaattactaatgtctcgaccattaatcaaaatttcacctgaagttggtttttgcaaggacccggcgatcgtcaaaaatgtacttttaccggcgcctgaaggccccataattaaaaccacttcacccttattagcctgaaaattgatatctttcaaagctgcaactttagcttcgcctttaccataaactttattaacatcttttaattcaattactgccattttactcaccaattgcctttgctggatcaaccttcaaaattgatctaatcggaatcaaactaccaataatacccatgactagcatccctaacgtaccactaatcataattgctggcgtaaaagtcattggcacagctgctggtaaagttaaatcagttaaccacatcaagataatcgcaattacaacaccaatagctactaaaattatggattgactgatcgttgcaccaactaaagttttacttggaattccttgagcccgcataacggcaaaattatgcattttttgcatagttaaaatatataggaaaacagcaatcacgatcaaagaaataacaaataagaatccaatcatcaattcaaaagttaagttttgagccgtatatcctggaagcttattaataaaggcttgaattgggtatgtcttggcatccttataattgaatttataattgctattctttgaaacaactgcagaagcggctacattaggagcgaccatccgcagttttttccaagttttcattgagccataaacaattggcgcaatattaatcttggcgttatttacaaaaccaacaattttatattttttcttagagccattcagagaaatttgatctccaagcttgtagcctttgtctttgaaactactgtctactgtaatctgattaccattctttgcttttttcccagcaattatatcttgatcttgataaataaactggtcttttttgatgcctaagaattgagctgaaattgagttttttccctttttcttaactacaattcctaattgaccaataattgcttcattcttgccaatttttgcgttttttaaatcgtcttttgtcagaattgactgactcatgctgatattggcatttttatttaaaacaatcttttgcgcattccaattttcaattgcttgtgtattctgacttgctaacccaacagccaaagatgacaacataaaaattaagtagctgatcaaaaagatcatcaaaataatcaagccatagcgcaatttttcatgcttaatttctttcagtgctagaaacataactacatcccctttgctagtatgtccaggctcttcttatagcgcgccaagttcttttcctgattttcgggatctgataagcataagttgataacttcatgactaagtaccatggcactccacaattgtggccccatattcaacaattgtcttgaataaattttgaaattatgtggtatcaagtactcattttgcgacatatgcaatttcatcattggttcatatttactgtattgaactttatcaataaacttaactactcttgcataaaaatgattaggatcaaatttttcattaggactcatcccagcatgaatgtcttcaatagcgatgtgatacatataaacatatgcatcaattaaatcatcaaaatatttataaaatgctcctcgagcaatgttggcattcttaacaatatgtgacaccttagcatctgctaacggataagtgctgaattcttctaacaacaccgcttcaatacgtctacgtttagcagacggtaaatttttaaaagtttgcttaaccattttgttttccccttttccaacacaaatgacgacttgtcatcaattacttatatcatagctgattttgacgagttgtcaatacatatacacaaaaaaagaaggcctctgccttccttctctaaactaaaactcgattatagtagtacaacctagcaacaccatcacggacgctaaatttgcttaatgcacaattatttggcgtatctatcttgtccatgtcgccattactcaaataatgagctgccatcattcgaatcaaacgaccatgtgccactactaataccttaccttctggatatttttgatatatttcgtctaaaaagttagcgcaacgtgcttcaaactctccgtagccctcaccatttttggcatatttaacatagtcgcgagtaacttttccccatggatcaacgacatccggatattccttagcaatatcatccatcttcttgccgtcccaatcaccaaaatcaaattccagcaaacgtttgtctaaatttaatttctttttacctttagtaaaaattttcgcagtctctactgctctcttcattggactggaataaacaacatcaaatttattttcatcaaacttagcggcggattttttagcatattcacgaccaaattcattcaagtctgcgtcaacttgtgcgccctgaattcgattatctttattcacgtctgtttgtccatgacgaataaaaactatttccattttttacatcaccttttcttaaaatcatacccttatttaactaatctttccatttctttactgtttttttagcgttttgaaatttaaaaagcttaaaatataaatagataattagaaaggggaaacattatgtcccgcgttacaattgaaagagatggtctcaccttagtaggagaccgcgaagaaccattcggcgaaatctatgacatggctatcctcatgcatggttttaccgctaaccgcaacactgaattattaagacaaattgccgatgatctacgcgacgaaaatgtcgctagcgtccgttttgactttaatggtcatggcgaaagtgacggcaagtttgaagatatgactgtgccaaacgaaatcgctgacggcaaggcaatcttagaatacgttcgcaccgatccacatgtacgtaatattttcttagttggtcattcccaaggcggtgtaattgcatcaatgcttgccggtctttatcctgatgtgattaaaaaagttgtccttttagcaccagctgctcaattaaaagacgatgcacttaaaggtaacacacaaggcgcagtctatgatcctaaccatattcctgatactgttccactagtcggcaataaattaggaatgaaactaggcggattttatctccgaaccgctcaagttttaccgatttacgaggtctctgcccgctttagtggcccagtatcagtcatttatggtactaatgaccaagtagttaaccctaaatatgctaaaaaataccatgatatttatgaaaatagcgaacttcatgccattacggatgtagatcacagattcactggtcaatacaaaaagtcagcatcagatttaactgctcaatttttaaaaccattattttagcgccgagtaaagtcgaactcagtacgaaagacgtaatgatccttagtacttacgtcaggttcaaattgaaattcaaaatcattaaagtcctgcaaatctgtgggattttttatttgcttctcggcaatgtagcgcaccatttcaccacgagccatcttagcgtgaaccccaacggtcttccacttaccattttttagttcctgaaagtcaaccgtaattaattgtcgtccttgactcaaataaggtttaaccaaacgtgtatattgcttggaagccaaatcgataactatattatcttcttgaaataaattttcagcgatatcactgccccagaaataatacaagctataatcacgaaaaccaaccattttagtatttaattctaggcgatatgggcaaacaccatcaaaaggccggagcataccataaaatcctgatagaatccgcaaattcttttgaatatagtcaagtgcaggttgtgtaaataaatccggagccatatattggtattgaattcctgaaaaagccaaaattgcaggggttaatcgttcatccaaattcatattttctagttgcaatatgctttgcttagtcacattttcactagcatgccaaaggtcttttaactgttcatttgaccttgacttaagaaatctttctagaattcgtgtcttatccaagaactgcggttttgactgaattggaaatgaatcacgatcaattttcataatttttgcaggtgcaataataattttcatttttagattttgttcctttacggtaaacttaaattgtgattaataagtcatgtggtaataagtcaaatgaaaggcgatgatatttgttctttttgatcataaatttgagtatatgaaactaagccttggtaaaggttgattttttaaatgttaaacttttgtttacttttaaatttagaccaatttttgaaattaagacctcggtgtcctgtacagtttgtcatctttgagcaatttaaagataactcgtactaattttcttgcagttaatgtgcaagcacgtttatgcggcgagtagacagcttcatcatacttcttttggtaatattttttgaaaacaggatcatgtaatcttgctagattggcagcttcaatcaagtaatatcttagatatctgtttccagtcctggccattggagtatgttcgttgctgtgatctcccgattgatattgattccaggttaggccggcatacttagccagctgttcttctttatcaaagcgatcgatacttccgatctcagcgataataccagctgtataggttttgccaataccgggaattgattccagaattttgctttctggtaatgcatcaacgatacgatcaattgctttttctagatctttaatagattcattaaagctttggatcatgttgtaatgaacagaaagcactgcatcaattgaatcagtcattactttgcctaagcgatatgaacctctaacagctttcttaattgctttagccaaggtatctggatcggaaaagcgtcctctgcctttaacctgtaagtaagaaattaagtcttcggtaggcatatccgcgatctcatccagagttttactatcggttacaatagacatcattgtagcaccgaaaagaggagtattaatcttatctttatcgacagtgattagtttattaacccgataatataaagcttcaatgaagtgctgtttggtacgagtcagttcttgaactaattcatatctggtacgcgttaaacgctctaaagcaagatagttgtcttgtctggcaatgcttactcgataatgtccaaagcttagatacaaagcaatgtaataagcatcgagaggatcagttttactttcttcaaagactttatgaaacctgctggtttctttggggttaattacatcagtctctacattgagcttttgtaaatcttcgtcattttggaaaaagtaagcaggatgaaaactgtaaatagatgtagcttccatgccaataatgatttgatcatagtgtttattttgagctagatctaaaatttgttttttcagttcactagcaccataaagatcattgacaaagctatcgttaattaagcgtttgttttgatcttctgaatcaagtgcaacgacctgtaaatctttagaactaacatcaataccgacaaataatttcattggaaatggcctcctttctttcaaatttctgatcatagattttgatcttcacatgttaacccctaattacagttcttaagttcaatctcgccagtataagtattcactggttgcttctttgaaagctgcacctaatcccaattgctcaaggactagcaaaaagaagcaatcaatacagcatgtgagttagagcataaaggaactgcctgggtggcagacttataaagcagacaaaactgcaggaggtgataacctagaccagttgaccaaagccaatgacaattagaggctaacatgtgaagatcaaaaagcaaatactaatttgattaattatcacaatatgactaattacaatttatataatacgaggaggaaaaataatgaatcctgattttgcaattgtcttaaattatcaacttaatgataaggctgatgccgactttttagtaaaaacagcccgtaatatcggtgctcgtgcagtgatgactgacaggcaaactgaagatttcaaaacagcttgcgctaagtatactatttttttagctaatccagaaaatagtactgacttaactaaggataacgtcattgataccatggtcaataaccgtaaagctggtaagactacaattattaatgtgcccgttgaagcaggcaagttttctgccgcaactcaagcaatgctggatacgatcaatgattggatgcaccaattcggtcacgccttcaacgaaggaaaaactagtgctttaaccagtagcgatggctttattttagaaaatcgccacgcaaattaccaaaaatatgtcttcttacctagtcctcttcctgacaaaatcgtggtagaaggcctagtcgaagaacctaaccgggtagaatggattgaacatcgaactgatcttgattttaactataaggatcaaaaattaactattaacttagtcaaaccagatgatgagtttgcttggcaagtgttgcgaattcaagcccaccgacctgaagatgacattttagaaacgaaattttagtaaaaaggcgttctttgtagcagaacgcctttttacaaccttatgtaattgctatttctattttcaaaaaaatttattcttgcttaagctttaactactgaaccattatcaaaaaattctctaaaacgacgtgcttctttatccagagtaatttcatcattaacttgcgataacttatagccaacaaaataaggtggcgcttcaaaacgtgtaatatatttagcacaaataccgtcatcattacgcggataaaagaatagattataagaatcgcagcggccattatacatgatatttaacaaatacttggcaccactttgaatccagtcagcccacaagtcaatgctatttttatctaacaagttaatattgagctcagtgtagccttgaacggggtgttcagcaatgttaacttctaccccacttttttcaaaaagggtctcaccttcaaaattattcgggtgaatatatttatagccatcttcatgttcaaagccaactatctgcatatgcgggtgaatcaaggaaccacctgaatgtggaccatagttcttgtaccaaacaattgactcatattggtcactagcctgcactttttcaaaacaagctagcgcaaaatgcatcaacttgcgattatgttcctgcgtataagtactaatatcgccgttatgatcactagattcaattagtacagtctgccaggtatcgcgcaaggtcgggaacttattcttaagccaaatcatgtcatcttccttggcgtaaatatcagttaaattttcaacatcacaaaatgggcaaacgtttttcttcttatccttacgataagattgcggtttgcctttagcaatgctcatttgaaaaacaagtggatcattagtcatatttattcctttttttatttaaaatagtttaaaatctaatgggtaaagttttactataatgtaaaatattttgtagctttactagcataaaaatacttgttatactttgttaaagcaaacgtttattcgaaatttatcaagagacgggttttaataatgcaatctagaacagaaatgagaaagcgaaacaatcgcaacaatctctatcttattattattggcataattgtcgtaattgcaattatttgtggctttgtcattcataatcaaagggtagctgctgaacgtagccagcgtgaatatgcttctacccacttcaaccctaatgtaacaatttatggtgtgcaagtaggcaagcttactgttaacaaggcgactgctaagatcaataaacaagctgataatgtcgtctttttaagaaataaaaagattattgctgaaaaagacgacaaggttcaaactatcagccaagctgaagttaaaaatattttcactaagcagcatactgatttgccaagcaaacaaaaatacgttttcaaatccgccaaaatagatgaagcaaaaaagagtttgcaaaaaatacaaaatgctgtagtcacctataagatcaatggccaggaattcaagctaaaagctgatgacctaattcacgaagttacttacaaaggtggtaaatataaattcaccgatgtaaaaaaactgcatgctaaaatggaagcgatcgatcaagaagtcaaaactctaaagaagagttataaatttactgttcctactggtaacaaagtcaatggcaaaacgattacggtaaaaaacgaaagctatggttggggaatttatgtcaagaaggctgtggctgcagtagaaaatgcttttattaatggtcaagatgttgttggtggtagtaagtatatttatggcgagggttatagtacctatgctcatggttatggcaagagcaatcatggtattggtaaaaactacgtcgttgtctccatcaaaaatcaggaactatgggttgtccgtaaagggaaagttgccgttcacttaactgacgttgtcacaggtactgaaaataagagtaacgctactcctaaaggtgtttggtatatcatgtacaaagaatcacctagcgtattgcgtggttataacgacgatggctctaagtatgcctccaaagtacaatattggatgccatttactttgagcggctgtggcttacatgacgctagctggcgtagcgattggagtaagtcagcctatcttactggtggctcacatggctgtgttaacattcgtccagctgaaattagaagtgtttggaacaacgttttaactaacgatgctgttatcgtatattaaaaaataaagattaatcgcctacttcaattgaagcgggcgatttttttgcgtaaaattaacagaaaagatatagatttttgaaaggatcaaatatgttagtcatcggtattatttgcttggtggttgctgccatttcttactttaaataccttagtgaaaagaacggacaagctaaccaaaaacaagctgaaaacaaaaatgaggcaaaatggcagcgcactttagcaatcattttcctcgttttcggaattttattaatcggttattggattgcattacgctaaaaaagacgtgaattttcacgccttttttaaatataattgattaccacattacccatattagctcttccctttaaaactaaggtaggaccgccgccattgctttttcctttaactattacattaccaaggctaatgcttaattgattatcaatctgccatgataagggaacgtagagatttacatttcccattgaagcagttagattaagcacgactgtatcacctgctgctttagcatcatcaagatagatattggcattaccgaatgaagcttcaagattaattgactgtaaattttgtgaatgaatataacgtgaagaatcgccagccatcttttgattaattacgatattgtcaccatcttcaatcacatcttgaacatgatgatgtgttacttttgtctctgtatcagcatcgtcactatcatcgtcatcattccaatgaaaactcttcttgataacaatttccggatcttttttaaaaagcaagctcaatcccattgaaacaagcaaagcaataaacaaaatcatccaagaggataagaactttttaatgcccaggggacctgcataagtaattactaaaaaagcaattgagaaaacggacaccacaatgctcttatcaagcaagcccttaattaagcaagccacaaaaatgactgtcaaaataattgtccaaacgctaattttgaagcttaataagcctaattgactgatcaccaaaagcgcagctgcagcgattagtcctactccccacaaaattcttgcaaaactgtttttcattataaagaccttctttcatctaagcatgtgcgtaattctttgtagtatcgacgggatgcatatacagttttataagtatcatgaaactgtatcttgcaatctgaaatcgaccgagttaaaccataaatttgatctaaattaataattgtcgatttggaaatccgcatgaaacctgcgcccaaaatattttctaactcatacaatttatgtttaaccaagtatgccttatcttgtgtatgcaaaattacctgcttggcatctgtttcaaaaaacaaaatctcgttcagtggtaagtagtaagaaacattgtttctaaaacattcaatctgatcattgtgttcaataccttgtaatttcttataaagctgctctatttccggagaaatatttttagctttaataatcagttcatcttctacggcatctggatcaatctcaagttttactttcatgtttctcactcccttctgaatctgatatttatattaaaaaatatttcagatagcttttccatagttttgaactaagtggtaaattttggcttctaagtggcaaaaaaaataagacgacctctgtcgtcttattgcttattatcaatgtaaactagtaaaaaatgttatcagtccaaaaataattcctggaaaattagccgtgaatagcggccaatctttcttttcaccaagaattgcataaagtacccagatcgtgcaattaattgcagcaaccaacggctgaaccggattaccataatttccgttcaaattattaataatttgcggaatatatgaaacatacatcagtacagataataccgacccaatacgtccaatagttaaaacagtttttcggtctaatcctttgaattttttcaacaaatcgctcctttgtgcttcattataagaaaagctagagtcgattgcaaaaatcatactttagtggacaccttccattagcacattaattctcttaactaaaaagaacattattaccgcaaaggctacactgaccaaaccaacagccatgaaatattgtacttcagtgccagttgaatagaacttaacaatttgtgcattcactgcttgtccagttgcatcagccatgaaccacatactcatcatttgcgaacgatatgcattaggggccagcttggtcgtaattgataaaccaattggtgaaatcaacatttcagcaatttcaactaagaaccatgaaccaactagccaaaatggactaaccttgcctgctgtaccataaagcatccctggcaaagccatccacatataagatagaccagcaaaaactagccctgctgcaaacttgcctggagctgttggctgctttttccaatgttcccaaagccaaacgaagattggcgttaaaatcataatgaataatgggttaagagactgaaagttggctgctgtaaagtgccaattaccaatatgaagcacggttctttgagcggcaaacagagctaaaactactgagcctgattcttcaatgccccagaagatagctgcagcaaagaacaatggaatgtaagccttaactcgtgaacgctcaaccttagttacttttgaactacgtagcatcatcacaaagtaataaattggcagtgcaattgctaaaatagtcaataaagtaatgacattgtcaacgttcaattgaccaaagccggccattgcagctaatacaagggcaatcaccacgaacccaataactacccacttaataatattaagcaagtcacccttatcaataggatcattaggcgtcaaactttcaggagaaaggtattttttaccgccccaaacatattgcactaagccaaagaacatcccgattgcagctaaagaaaagccggcatggaagttcatttcattaccaaaaatatgaaagccaaaaccttgtgctgcccatggaactaaccaaggtgcaagaaatgatcctaagttaatcccaaagacaaagatgctaaaacccgcatctcttctgcgatcttcaactgaataaagaccaccaaccatgtcagatacatttggctttaataaaccagtaccaaccacaattaaggcaattgaagcatataacgccgttacaccggctggaagtgccaagacaatgtgacctaacatgatcaaaacgccgccataaaagacggtttttcttgaaccccaaacacggtcagacagccagccaccaactagggttgataaataaacaagtgaaccatagattgacatgattgatgcagccgttgtttggtccattcccagaccacctttggtgactgcataatacatgtagaaaagcaggatggcgcgcattccgtagtaactgaagcgctcccacatctcagtaaagaataacgtggacaaaccctttggttgtccgaaaaatgctgtatctgaatctcgtttacccaaagaaaaactcccctcttatctaatgtaagcaataaaggatattataccacgaaaaataaggatctacttcttacatcaatgtcattaagttaagacattgacaaattgaatctaatctctgtagaaccgaatcattatgatttagttctttttttgcataaaataaaggcgaaaagaacctaccttttcgccctctgattaaattattaaaccttcaaaattattgccagaaagctggtgttaattatgaaagcccttcataaaaatattttagatcgtcttgatcaaattatcaatgatactggaaagcatattcatgattttatcgatgatcctcatgccttcactaggaagcggtctttagatgcagctacagtcattaaaactactattaatatgcaaggaaaagatttgaccagtgagttgtttagagcttttggccaaaaagctattaaaaataacgataaagtagtcagtacttccgcttatgtccaacgcaaaggttcacgccgttgacatgcacaagactgacctggacggcaaggaactgaccagctacaagctgcaaaaggacctgcgattccacttcgacaactagtacaataacagaaattagccaatatacagcaaagtgtctgggaagaaactcgatttttagcccggatataaaaacacagaaattcattatttttagtgaattcctgtgttttttgtttttgaaataaaaattcgaaggcttcaccttcttgttggctccatattttttcttaaatgcgttctgcgcataccaaatacactcttcatgtgcccaaaaattggctccacatctgacttgcgacagccatagatgcgtttaccttcttcgctttgaagagtctcttttgctttttcttttaaatactgccaattaggattgtagtgaatctgtctttgtcgacctgttttggttttagccaattgggtcagttcttcagttagctggaactcatcagcttcataaattttgaagtttctgaccatgccagtaaatcgatcttttctttgactataatatttgaagttgaagcggacgcctgatttatctacgtaatagtcttcttcttcgttatagtaccagttgtcgacctttgatggatctttcttatattttcgcgtttgttctttttcgtattgggtatacggaatctgatagttcttatctgaataattctcttccagaatcgagtaattgtattcactgccatagcccgcatcggccacaatattttgaaacttatcgaaaattcctctggacttcatttgttctagaaatagttcgaatattctaaagtcagccggattaggaaacagggcaaaatcaactatatattgattagtagtcgctgcctgaatattgtagcctggctttagctgcccgtttttcatatgatcttctttcatatgcatgaaggtggcatcatgatctgttttagagtagctgttacggccagcaaagatctcttcagcttcttcgtactttttagcacgcggaataaaatcttttctaagtttatgtgcgatcttctttaattcacggcgcttggccttattttttgatccgcctggaatggctttaggttctcgatcaattttctcggtcagcttctcaacttctttttccgtttcttgagccagaatctctaagccttgactagtttgggcttcttcttcggccatggctttgactacttctttattgatcagttcttcatataaagcagacacgtcttcctttaacttggcatgatacttctcaatagcttttcgccagacaaaagtgtacctgttggcgtccgcttcaattttagtaccatcgataaaaactgcattttcacggattaatccctcatcttctaataatgaagtaaagtagacaaaacactgcttaattaccttattggcatggtcgcttgatctgaaattattgatcgtgtgataagaaatctttctattgtcagctaaaatcatcatgggcagattctcttctagcattctttcaatttttctgcctgaaaaaactcttctagaataagcaaagagtaaaatcttaagcatcattgccgggtgatatgcaggtctgcctgtattagaagtggtttctaagataacttcgttaggaatagaatcaacgaattcactgataacactggcaatgtgatttgcagggatagaaaaatctaaatttaatgataaagtagtttgtcctgtgatataattttgatacatgtttaagcccactttctattgtttttttgtggtgattaaataatatcaaggaatgggtttaaagtatacaaaaagagcgatgacttcttatgaagttcatcgcttttttcatggcctggaaattagttttttcccagacactttctattattaaactagatcatacatttctggcattctgcaccattttgaattaaacattcgtctgcagtcaagttctcactaccagctaaaactttttctcttactctaacataataaattgagttgcatcgctttttaaaggcataaatataagccttatttaaatctcttgttgttgcattatcttcaacaaataaagttaacgaaattgattgatcaacatatttttgtgcagcagctgtaatatcaataatagcattaggtcctacttcatatgcgcccttttcgtaatactcataattgtctttattaatcttataagctggtacataaattcgacccaaatcagcctctttgcgtgtttcaacaggagctactactggctgcaaacttggtgtacatgaagataaataactaattgatccagtaggtgcaactgctaataagttagcattagctatacctgtctttttaattttagtaatcaattcttcccaatcttctttagttggaataactaatttatatttagctacaatttctttaatcttgtctgttttcggtgagacttcctcatcaataaattttttgaaataatcaccactagcatatgatgaatctttgaatcctttaaaagcaccatacttttcagctaatttatttgattctttaaatgcatggtatgcaattgtataaaagaaaattcctgtaaattcaactgcttctggtgaatcataataaatatgattagttgctaaaaagccatgtaaattcattgctcctagaccgattgctcgattagctttatttcccttttcaattgaaggagcacaatctaaatctgaagacctggcaacacgattaagcgcttgaacactatcagaaaccaaactacctaacttgtcagcgctattcattgctgctgcaatattaagtgatcctaaattacaacaaacatcgtagcccgtcttattaagacttaagtcttcattataggtacttggcgtattaacctgagcaatttctgaacataaattagacatcacgatccgccccaatttcttttgtgggtttcttcgattgacagtatcttcatacataatataaggataccctgattcaaattgaacttcagcaatagtttggaagaattttctagcactgataaatgtctttttaatacgtggattattaaggagattttggtattctttagtaattgaaatatctgacattggtttaccatattcacgtttaatatcatatggtgaaaacaaagccatctttttattttctttggctagttcaaaagtaatatctggaatcactacgccaagtgataaagatttaattcttaccttttcgtcagcgttttctcgtttagtatctaaaaattgcataatctggggatgatgggcacttaaataaactgcaccggcaccttgtctttgccctaattgattggcataagaaaatgaatcttctagtaatttcattacaggaattatcccactagataaattcttcatttttttaataggtgcacctaattcacgcaaattagttaagcatagagcaacaccaccaccacgtttagataattgcagacttgtgcttattgctcgtgaaattgattccatattgtcttcaactctgagcaaataacatgaaatatattcaccgcgtctctttttacctgcattcaagaaagtcggagttgctggctggaaacgattactaataatatctttaactaaattcaaggccagttcttcattgccatcagctaaaaataaagcattcataacagcccgatcttcaaaacgttctaaaaattgtttattatcgtttgtttttaaggcatatgctttatagaatttagctgcacccataaagttcaaaaagctaaaattttgtgcataagctaatttgaaaatttctttaataaatttagctgtatataaatctagaacttttttatcatagtaatcattatcaactaaataagctaatttttcttctaaagaagcaaactttttcattcttggttcaatatgattttcaagatattgcttagtagcctccttgtcagctttaaaattataatttcctttttcatctttaaatttagcaagtgcatttaaagaaatatatgaatcattattaagattatcagtcattgtcttcacctgcatcagcaattattttattaacattatttacatcttcagttgttcccagtaactcaaatttatatagataaggaacatgtaatttcttagaaattacattccctgccaaggcaaaagaattaccaaaattggtatttccactagcaataacaccaatacatttttgccgattagccaatttgttcaaaaagtggataacttgcttaggcacagcacctgtagtcccatggccaccagaataagttggcgtaattaaaatatattcttcagaaactgaaatttctttactgaggttaataggaatcctaatagaattacaatctaacttttcgacaaagcgtgctgtattatttgaagtggaagaataatagacaactaatggctttttagaaatcccagtcatcatctttagtctcctcccctgttcccatgacatatgaagaaccattaccagaaaagaaatcatggttttcatcagcttgagctgataattgagcgaatacttctggagaaacataagtttcttctgcggtaaaaggagaatcatagcctaaattttgtaaaaatttacctgcattatacaaactgaaatgaattgcatcatcaaccaaatcaaaatcatcataaagctcgtgcaaatatttcttttccaaatcaattagtttatctaagaaatcaaaaacgaattttttcatttctgcttgtttagctggagctaatttctttacggccaattgatatttgtaaccactataataattgtgaataaccttatctcttaagatcaatctaataatatcagcagtattaggcaatttacctcttgcagctaaataaaatggtaaataaaaaccaccataaagcaggaaccctggcataattgctgcggcaacctttgatttaagcggatcattgcctgtataatacggaattaccgctttagctcttgcttgtaaagcatcattattaactacccattcatgcgcttcttcaatttgttcactagtacataaagtagaaaaaatagttccatatgatcttgcatggacagcaaccataaaagcaaaatttgcatagatagcttgctctatatcagtttgtgaatttttaatttgggctacatcacccacacttgattgagttgtatctaataaagtcaatccagtgaaagtgcgagttataagctgttgccagtcatcagataattgattccaagaacttatatcattcgaaactgggattttttcaggtaaccaaaagttttgagtaactctgttccaaacctcaagatccttatcatctttaatgtcattccagttaatagctcgcatatttttgccgttgttattgtaagcaaattcaactggtgactgtgaatgatcataataactcatatatttgctcctatcattatttattgttttatctaatatatgtgtaaacatactatagcatcgtctgctcaataatacaacatgtggatttttggggttatttataatcgatatattgtggttaagccgttttgataatacaaaattattttcaaatttattttatcttccaaaaataatgtaggtgttgttttttgcttttttgacaaaaaaagtgtctgggaaaaaagtcgatttttaactaaatttaggctttaactcaaaaaaatcccattaaatcaaggtttgtatgtaccaagatttgatgggattttgaaatttctgagttttttcccagacacttttttcatggcctggaaattagttttttcccagacactttcttttgcgatttttgctttatttgttagtaccatctgctcctactggcagggccgggaaaataaccgtgaaggttgaccccttgcctaattcgctttccaggcggatggtcccgtggcactgctgaacagcatgcttgacaatggacaggcccagaccagtgcccccggtcttgcggctgtggctcttttccacccggtagaagcgttcaaaaatccggttctgggcttcctggggaatcccaatcccagtgtctgctacctgcaggatcgcctggccccggtgctccttgaccgtaatcttggtcttgcccttttccttgttgtagcggatgctgttgtcaatcaagttgtaggcaatttcataaaccaggcggaagttggccaggatcatggtgtctgacaaattggtctccagcttgattccatgccggtaagccgaaccctgcaaggcttccaaggcctcagtcaccggactcttcaagttcagcttgatttcttcaaagcgctggttttcatccaagtgggacaaacggatgatatcgtcaatcaaggtcaaaagctgggcggaagattcatggatcttcttgtaaaagccatcccggtcttcgtctttgaccaggtggttttccaaaagctcagctgaccccatgatggactgcagaggcgtcttaagttcatgcgacacattggccgtgaattcccgccggacctgctcttcatggtattcttccgtcacgtcaaccaccaagatcgaagtccccttcaaaatcttgcggctgataatcgggctggcactgatttgaatattgcggccgtttctttccacaatcccctcagtatgagccaagcggctgtttttatcgatgatttccttaacatcgtctggtaaggggtcagtgtcatgcaggcctaaaagtgaaactacagccgggttagacaaaagaatccagtcatccaggtcaatcaagatcaagccttcttgcatggcatctgttaccgtctttaattccttttcccggtggtgcagctgctccatttggtcagcgatctgcttgttctggctgtccagcctggtcaagagcggcttgatttcatcataagccttgctttccaggggcttgtccaagtccatttcattcagcggcttgacgatcgtttgcgagagcggcttggccaggaaccaggacactaaaaccgccaaaagcatgatcagcaaaagcggcgacaagagcctgagcagcatccgccagaaggagtttctggtgatcgcgatgcggatgaccccgccgttattgagccgttcagcgtagtacatggtcacggtcgacaaggtcgtgctgtagcgctcgctggtccccgtccccttcttcatggcttcggcgacttcctcgcggcgggcatggttgcccatctttttgggattctcttcattgtcgtagagaaccttgcccttggaattgatccaagtaatccggtagttctccccttttaagttcttgaggtacttcttgccgctggtatttaccccgctggccgccaggtcagcctgggaagctagggcagacatttctgtatggtcgaagtcaatgctcaagacaatcgtgcttaagagtacggcaaagaagagaaccagagaagtcagtaaaaaacttgcccgaaatatcttcttaaacattagtctgcttcatggtagcgataaccgaccccgcgcagcgtttcgatatacttaccagcctcacccaacttctgtctcaaggttctcacgtgaacgtctaccgtgcgcgtttccacgtaaaaaccagtctcccagatctgatccatgatttcttcccgggaaaatacagttcccggatgagtaatcaagagctttaggagtccgtattctttcaaagtcaaatcgacctgacggccgttttcgaaaacttcatggcgctttaagagaatcttgatcccgtctttttcgatcttgtcctccttcttgcggttggttcggcgcaaaacagccttgacccgggaaaccatttccatcatcccaaatggcttggttaagtagtcatccgccccggaatccaggttcttgaccttgtcatattctgccgtcttagcactggcgataatcaccggcaagtcctcggtcgcggaagtatacttgagccggtggagaatttcgctgccgtcttcatcaggcagcatcaagtccaaaatcactaaatccggccggttattgtccaggaccttgaaaaaagaatgtccgtcttcaaagccgcggaccttgaagttcattgcttccagcgtgtacatttcgatttcgcggatgctttcgtcgtcttccacgcaccaaatttcagtcataaaaaatccccttagcctttcttaaacttatttatagtttaccatttacaagagtgttaaggggtatttcatgggattatctgccagtcttgccggtagttacaaataaggaccatttagcaatattgacggcgtgatcgccgattttttcaaagtacttcgcgaccatcatcaaattgatcaaatattccggattactatccttgttaaagttatcgatcaaaaatgccttcgctttgccaaagtcgtaatcgacctgatcatcgcggtcgattacggctttggccagttctacattctggttggccaaagccgttaccgcgtcgttgaccatacaagtagcaatttgggacatgctcttcaggttcagcatgtcatttgcgtctgagaggtgttctttaaggatcagttcggcaatgtccgcgccaatttcaccgattctttcaaggtcgtagaccgccttcaaagatgcactgattatccgcaagtcagtggcaaccggctgctgctccatcaaaaggcgcaggcaggtttcttcaatgtcacgctctgccttgtgaatccggtggtgcaggttaatcgtgtcctctgctttatggtagttgcccgtaaacagggcgtcggttgattcagaaatgctttccttgcacagctggccaatttcttccattgcttcatgcaagtgatccagttccttgtcaaatcttgttctcatttttagcctcctatagccttaaccgaaccggccggtaatgtatttttcagttctttcatccttcggcatggagaagagctggtcagtttcaccgaattcaaccaggtcacccaagaggaagaagccagtcttgtcagagatccgcacggcttgctgcatgttgtgcgtaacgataacgatcgtatagttcttcttcagttccaaagctaattcttcaattttagaggttgaaatcgggtccagggcactggtcggttcgtccatcaacaatacttccggcttgacagccagggcccgggcgatgcagagcctttgctgctgaccgccggacaggcccaaggctgatttcttcagccggtccttcaagtcgtcccagatagctgcttgcttgagggaagtttccacgatttcgtctagttccttcttctcagtaatcccgtgaatccgcgggccgtaggcaacattgtcgtaaacgctcatcgggaacgggtttggtctttgaaagaccatgccgactctttgccgcaggacggtcacatccaggtcaccgttatagatgtcagtgccgtccagcttgatcgagccatcaatccgacagccttcaaccaggtcgttcattctgttaagtgatcgcaaaagagatgatttcccgcagcctgacgggccgatgaaggcagtgacttcgttctttggtatgtgtacattgatgtcatgcaaggcatgaaaatcactgtagtacaggttcagctttttaattgtaattttgtcttccatcattaatttcctccgttattgcgcttgcgcattctgtcagagatacggcgcgtaaccaaagtgaagagcaggaccaaaacgaccaggactgctgatgtaaagttggcaatctgagtggctgacgggttcaaggccccttcagttctcatggcccagatgtgcagggacagggtttcaccgcttcggaacgggttcaggggtgaacttggtgagataaccttccagaagttctgccagttgatgtaagttgactggccggaagtatacaaaagcgcagcggcttcaccgaagccgcgcccagcagccatgattaccccggtcaagatctgcggcatggccgccggaatcaagaccttgcggatggtttctgacttggtcgcgcccaggctcagggaaccttccttgtattccaccggcaaggaccggatggcattgttggtttcagtagttatcagaggaatagaaagaattgaaatcgtcaaggcaccggccaagatattccaggacatcccggtccacatgatgaaggccaagtagccaaacaagccgataacgatagatggcagggatgacaaggattcgatactgatttcaaatattgtcaggaacttgccttccttggcatattcagccaggtaaaccccggccccgatgccgattggcactgagaccagcagtgagaggaaaactaagtaaatagtgttgaaaaactggttgaaaatcccgttgccggctgctcccaagaagtcccactggaagcctttcaagccgtcaaagatgattgtcagcattaagtagagcaggaaggccagcataatccagccgatggcgtagaagattcccgtcatcagccggtcttttattttagcacggctcatatttatttttccttctttccattgccaagcttgtgaatcaatataatcaaaacgattgagatgacgaagagcaagagagccattgaccacaaagccagattgtattccccgccctgggccgtgttacccatgtcagcggcaatctcactggtcaggttgctggttggtgacaagagactggtcgcgaaggaccgggtcttaccgataaccatggctacggctaaagcttcaccgatggcccgggccagacccaagaccaccccggtcaagataccgccgaaagcggctggcaaaacaaccttgccgatgacttgccagcgggtcgcccctaaaccgtaagccccttctctgtagctattcgggactgacttgatggcgtcagcggcgacagtagtgatcgttgggaaaatcatgatggccagaacaattgaggcggccaggactgagaaaccgcccatctttgggtggaaggcgtttctgattataggaaccagcttggtcaagccaaaccagccgtaaacaacggatgggatgctgacgtagatttcagttgccggccggaagaacttttcgccgatttttggtgaaatttccgtcatgaaaacggctgagccgatcgcgaacggcaggcagatgaacaaacccaacaagcaggtttccagggaaccaacgatgtaaatggcagccccaacttttcccccgaacatgccggtcttgtcaagcggtgcccagtcactggtaaacaggaactcccaaacgctgtggtgcgccttaaggaaggtctggctgccttggtagagcaggaaggcccccataaaaagggtcaaagcaacgatcaagaggccgcaggcgatgtagtccgcgcgccagcgcttgtctttggcaattgctttttgaactactttgtccataatgctttatttctccttcttacttattagcatgggtggctttagcggcagccagcagtttggaggctacgccgtagcccatggcttcgatcttcttgctatattccttgctaagcatctgctgcaagaatgccttggcagcacccttgggctggcccttagtgtacatgtgctcatagctccaaactgtatacttgccattatagacattcttcagggttggcttaacaccgttgattgacacgatgccgacttgcgggtcaccagtcaagtaggacagggaaacgtagccgattgagccggaaacactttggatcatttgaaccaaagtacctgagtcgtcagtttccagagactggtttgactggctagcgtgcttcttcaaagcgtattgctcaaaagttgcccgggtacctgatgaagatggtctggaaaccaggacgatctggcagtcattgccgccaacctgcttccagttggtcaccttgccggtgaaaactttgatcaactgttcagtggtcaggctcttgactccagcatccttgttgatgatcggggcgatggcggtaatggccacttggtggtcaactagcttgctggctgacttcttgtctagcttttcatacgcgaacaagtctgagtccccgatgtcgatggtgccgtcagaaacctgcttcaggccttggcctgacccacccccgttagtgttgatgacactgtccgggttcttgtccatgaaagtcttggccgcgctctgcgctaaaggcagaagggcagatgacccggcgatgttaactgtcccggaaactcccttggtatcggctacgcagctgtcgatgacgcagccggtgacgattgccagcaaaacaagtgcaacgatggcgactttggtttttttgcgtgacatgttaattcctccttgaattcttactgattcaaccttcatggaggcaagttaaatgcattcagtgatgattgttaaatcaatgtaaaatgtttaattttatttaagcccagccgctttcttaacagaattacaaagttttcgcaaggctcccctttacttttcagtttattttgcttaatttatccgttttttacatttgtaaaatatagagctttcactctttacaccttttacatatcgcgcaatattaggatataagtgttcttcttcagtccactcaaagaagcgtttaaccgcaactatataattctggattgtggtcggtttcttgccacttgcctttaaaaattctctgtactgtcttacagtgtcgggatctggatgcgtgatccccttttccctcatgtagataaaccattgcttcaatgaagttcgataagtcctaactgtattaagcgaaccatcaataaatatgacaaacttatcaaaaagatcatccaagttgctatgctgaaaatccaactgctttgagcctatcgaggttaccagttcaccgcttatttttcttattggttttatttctaccatcctaacattcacctactttgttactatgctagcttattacattgttatcttgctatattgctataccagcattgtattcttgtagtatcagattacttcagcataatgttacatttttgtcccctaatatgacttcgaaaacgggcttctaagcttaatatacttgttatatgttcaatttattcataattgttaaaaaagctctgaaaagcgaatttatcatgcattatggacttacaccgctccttatgctgaataccttccaatgttgttgggtagggggggatgcagcaccaatatcaaccaaataaaaaggggctagctctgaagctaacctcattcattaaacattaaaagtaaatttataaataagtcatacttgggtttttatcgctatggtttgggtttaaacacgtgaaattgtgctttatattaataccctgcatctgcaaatattgaccaagcagagcttttaatctgtcctgcgatctattattattgttttggatattcattttatgtataccttcatttttataaattgattgagtggtaactggtcagagttgctgctcattttattttgccaataagtcagccaataaggtggtagaagctgtacttcgtactaacaatattaacgaacatacttagaatatagggttacgggcaatgtcattaagttaaggcattgacttttttacctaaaatcaacttgattagtgggcgtttatttactttgaaagtctatcctaaaacttgacaggagggattaatttgagcgaagagaatcaaaagaagctgtttggcatctcagcgattatttgcattattttattaacgattacctattttggtgatttagccatcagcaataccttaattaattatcacagctgggtagggacgttttgtcagacttttggcgagtttccggtttatcttatttttgccttatgtggacagattacgatgacttatgcctggaaaggcgactgtgaaaagctgctgggggcaggaccgttgtttgttggcgggcttgcactgtcgctttggcagagcaagaagtatgtcaatgaattcttgggctatctgtattcggtacaaactaaccttaaaaacggtaaggcgatagcaatggccaacagcgactcagtaaagggcggttatgcaggctcaatgattataatggtctggctgttgtttttcgttatatttacgctgttggtacaatggtggctgaaaaacaaaacgactaaacagctgactcgctatatgaaaattgcgattttggcgtcattgacggtttggtttgcattggaagttaatctgaccttaaaagacctgtggggacgctatcgcccatatgaactcacgatcggtaatcatgaatttaccaattggctgacgatcaatggcgttaatgggcataagtcattcccatccgggcatgcgatggcggcaacgttatgcatcgttttttcatggttcgtttccaacaataagcataagatctttttcattggtggcatcgtttatggtgtcgtgatcgctataagtcgagtaatcgtgggcgcacatttcctttcggacgttacgttctcgtttttcctgaccgtactgatcatctttatcatgaatggtcttggtaaaaagctaattgaagatttttaaaaattagggctgtgaccatcgaaaggtgaccacagcttttatttatgtgttaaaagtcatgagaatacgccacctttgataaaatttctaatcaaagatagcgtaaagcggtttcaaaaattaatagagtagagggagttttataactcgcccctctcattgcaccggacgtacggttccgtatccggcgctacgtttgtgattatttacgagataaataatattctagcggatcgaccaagcctgggcgatccgctttgcttatgcccaatacttttgggctaagcagaaagttaatgacatgacccgtacttcttttataccaacctaagcgcgtattagctactttatgaatatcttcatcactaaaattgcactttagtgccttgttaatccgcattaagttaatgtatattcgttttggtagtttccattgtttaatgattaccacccgtactttatgacgcagccattgactgaacttaattagaaaatatttcatgtcgccaactctaaagtaattgacccagcctctaactacttgatttatcttagtaaagactagtgatagaggctgagcagctgcttttctgcgacagagaagttctctcatcttgtcataaagcttgattttgcggtcatctcctggctttgcttgccagtattcgccacttttccagaaggtaaagccaagaaagttgctcttggttggtcgtacaactttggttttggttgcgttgacctttaggaatagctttctttctagccatgatgaaattgaattcatcacacgtttggctgatttaccgcttttgacaaagatattgcagtcatcggcatagcggacaaagcgcaggcctctttgttccaattctttatccattttatctaaatagatattggatagaattggtgaaagagggccgccttgtggtacacctagtttattaggcttaacccaaccatcttccattactccagctttaagaaaggctcgaattaaatggagggtggttttgtcatttacttgctctctaattattgaaattaatttatcatgatttaccgtgtcaaagtatttctcaatatccaggtcaacaacccattgatagccttcgtttaaatattccaagacttgttcaataacgtcatgagcactgcgtccaggtctaaagccatagctatgctcactaaaatgaggatcatagatcttcattaatacttgggcaatagcctgctggattactcggtcaacaaccgtgggtattcctaaaggacgtttcttaccattagctttaggaatgtagactctgcgaacagcttgcggacgatacttcatcttcatgatggcgtcctttatttctacttgatgctttttaaaatagctatcaagctcatcaactgttctcctgtctacaccaggcgctcccttattgattttgactctcctgattgcttccctgagattgttttgacttaaaatctgttcaattagttccatctcgtgatatctccatttctacttgtaaatttattcagaattgtcccaattgctttcaccatcaaagagttacgttctctttgtgctaggctatcctcttatccggactgtctgaacattgcttatagcgagatatgctcttacaaacattaggcccttcgctccagtttcattacaaaaccttcagcactactacgacctcagctgacttctcgcgattaacctttttcgaccaggcttacgatcgctgatattaaagcttactcggtttcacctgtccacgagatctctcggggtaagacattcatctttaattttccactgccccctggtttaccgtcttggttttacggttgtcctttggactttaacttgtgctgcagtctcatccaccatttggcctgaccaggtttctgtacgtaggctcggaaaactcgctagccacttccttcacccatagcgtcaccgctaacggcttgtggttcgctacacttggcgacaactacccgtgatctagactttcactagactaaacaaatgccatgcccgacacacagcaaaaaacactcatcaaattctgatgagtgttctaagacgttctccgttcagagtcaatgtcttaacttaatgacattgcttcttacatagtggatccttatttctttagctatttattttttagtcaattgccttagcaactgcactgtttacagcatctttttcgtcttcgattaagttaaccttgccttcgatgaccttaatgtccatcttaatttcacgactaagaagtggaacatttaccttaggttcaaagaattccttgaattccttaagtctttcaggagtatggaagacaccggtagtaactgtgataaatgtagcgaattccatgtcaccaccaacagtcttgtcaagccaatcccagtcttctctgatccagtcccaagctgcttgttgaccataatggttagcaagtaaaccacggtaccaaccacgtaaatcttgtggcttaactacgtcagcattttcaaagtcgctaacaatagccttgatagctgcaagatccttggtgctggttacagcgctgcgtaagtcaaccttgtatgatgggtcagctgttctttggtattccttaattaacttatcaactaattcagcattgccaaagttcttaacttcattgattaaaacgtatggacgaatatctgcattcattgcctctaagttgtcttcattagcagtgaaaatctcatgagctgttttaattgagtctttattttcagcgtaaagactggcacttaattcatatggacgaatttgtgcatcttcatcgctttcacctggcttaactttccagcccaaacgagcaacttgaccagcggataacttgtcataaagcttctttaagtccttttcttgagctgattcaggttcaacaaattggcgcaacttagcagcagtagcgtaaagagcattaataactacacttgacttcgagtcagcaaatttagtcaaaagtggcacaacagcagcataagaaatttgtttaccttctgctaaaagacgtaagtcttgcaataattgcaatttggcaattggatcaagttcatcaacatgagccaaaatatcatcaagcaaagtcttgtcatacttaacgataaagtgcgagttgttacctacattaattctaagtgggtgacctgcttcactacgtaaattcttgtagtaacctaagtcgatttccttatcagacataatcttaggtgccttgaagttagcattcaacggaatttgccattgtctaccaacgtctttaccttcaccaacgaagaattgttgttgtgaaagctttaagtgaccatcgctactatcaacatatgcactaactactggataacctggttgctttaaccatgagtgcataatcttgccaatatcaaggtcagttgcggttgaaagagcatcccaaagatcgtcaccagtggcattaccgaacttgtggtggtcgaagtaatacttcaagccttttcttaaggcatcgtcaccaagaagtgaacgaaccataactagcattctagaacccttagcataaacaatggcactgtcaaaggcagagtcaatatctgctggatcattgatttccatttgaattggttgaacaccgtcagtagcatctctagtcaaagctgcaggtgcttcactggtttggaacatttcccaaatatgccaatcaggttctagaccatcaactgacaagtattccatcatgttagcaaaactttcgttaagccataaattatcccaccatttcatggttactaaatcaccgaaccattggtgagccaattcgtgagtaataactgtagcaaccaatttcttcatttcaaggctagtattgtctggatcaagcaataaatatgcttcacggtaagttactaacccccagttttccatggcaccagcactgaaatctggcaaagccaattgcaatgattgtggaagtgggtatttagtttggtaaaattcttcgtaaaactcaattgcattcttagcaacatccaaagcaaagtctaattccttaggtttgtgtgctttggttgcgtaaacaccaattaaaacgccatccttggtatgggtagtctttgattgcaaatcaccaaaggcaaaggcaaccaagtaactagacatgcgaacagtttcttcaaagtggtggtagccgtccttgtccacttcaacttcaggcatattggcaagagcaacttcgccatcttcttcatcccacttaagggctaaagtaaaggtagccttagcttctggttcatcgatacatgggaatgcttgacgagcaaaagtggtttcaaattgagtaccgataatttgcttcttgacaccatcaacttcgtaatatgaaggataaatacccatcattgtatcagtaagtggtgcactgtattctacttcgataatcgccttaccgtttttgccagtttcaattttaatggcttcgtctttttccaatacatcaaaaggaacatccttgccatcaaccttaacgctatcaatggtcatgttcttttgattaatgaaaacaggattttcgattacttcaccagtaacagttgaagtaccattaatttccttttgcttacggtttacgttaatacgtaaatcataatgttctgggtggaaagtttcataaaaacgtttaactgccatatttttcctcctaattaatagatcatttacttttaattttaccaaaataagcgcgaaagcgctcaaaaaaggctatttcttgttgattgtaaggatgacgtttcagttctgtaacattgctgtcatattgagcttgtactatagaagcatagtcattaagaaataaataagttttgaaagaattaattaaatttaataaggaatgaatacatcaatgaataaacatgttaaatctactttagtaaaaatcttagctgccttagcacttgcctttgcttgtgttgcagttgcaaatgctttttctaccaatacttcaactactcaaactgttcaagctgcaagaaagctttcaaaagctgaaaaagctgctaagagatggatcgcaatgcgcgaatcaggtggtagctacactgctagaaacggtgtttgttacggcaaataccaattaaacattggctacttacatggtaacctttcacctaagaaccaagaacgtgttgctgataattacgtttacggtcgttacggttcatgggttaacgccaagagattttggttagctcacaactggtactaaaattaaattcctttaattcccaaaagctaaagaaaaccagcttagtccaattgactaaactggtttttgttttactcaaaattatcttgcttgataaaacgataaagtgcaatgactaaaactaagatcgagcacgccatccctacataggccattgttccaatgtggacagcattgttagcagcttcacgggctacttgattttccattgcatagcccacaacccatttacgcattaataccggcgtcaagacaaaactaactgtactaataattgaagtcactaacgctacattacgcgaatatggttctttaaagaactgtgctaatacgcagaatgctggagcaatcatcaatagcaagatccacataataatccagcgcccagaacttgaattcatcatctgcgcactattagtggcataacgatatgagctccaaagcgatccaccagataaggtattaagcaaactcaagaaataagatccacgttgtccataaacaccaccattattggacagaataccttgaacaagttggaaactatcagttgatccagccgatgaaaaatcgaccgacacaacttgcttcatataagtagctaaaaacatggtaactgagccacctaattctagtgctcttaacatgcttaattttcttgaagctttcagatgaaattccagacttaaaactcgatcaggatggtgactgtgaccaatgataaaaatccctgcaatgacgatcaaggctaagataaccaatccccaccagaatttaatcatggcgaaaaataaggctaaaacaataatcgcaaccgaaatatatggtcggtcagaaaaaatattccaaaagttcaacttaacatgatggtaatttttccttgatgcatttgcgacattttgattaataatcggctgaggattactaatttttctgctgcgaaattcttcacgtgttgttgctcttgtcttagtataatcggtccgtgaacgatctgcgccggcttggccgtgctcttttttcatgcgatattcacgccgcgacatatgtgccataaactgcagcccccttctcaaagcactatagtagcacattatcacttttttgcttgaattaagaatgaaatttcaaagaaaatttagctttgttttgcatgtgctaaaatgaatattaataattgtgctttttttagaaagagataactttttgaataaaactaaatcagcaaaactgccagctggttggcatatggccttttataccttatggctcggttgctttatcactgggatgggctattcaatgacaatgccctttatttcactatttatttcagatttgggtaattattctaaactgcaaatcaatctttattcaggattagcttttgcaatgacttttattgcccaggcaatagtttcaccatattggggcagcctcgctgaccgcaaaggtagaaaactaatgtgtatgcgtgcttctggtgtgatggctttaactattaccctaactggatttgcacccaatgcaatttatattattgtaatgcgttttattcaaggttctttttctggttatattaacaacgccaccgctttaatggcaagtgaaacgccgcatgaacgtagcggctgggtcatgagtcaaatgatgacggccgggactgccggaaatttggttggaccgctattaggtggtgctctctccagcttctttggcaatatgtttggtggcgcctgggggtatcggattccattcttcattaccggtgttttaatgttcatcgtctttttaggtacaacgttcttagttcacgaagactttactccaatttctcgtgaaaagatgacgccgatgggcgaaatcatgaaaagtttgcctagcgtgaaattgattgtggtgatgtttattactaccatgttggtacaatcatcaaccatgtcaattgatccaattgtttcattatacgtaaaatcaatgatgcctcatggcggggatgttgcctttgttgcaggtgttgttgcggcaacgcctggtcttggaacgctaattgcggcatcgcgaattggacacaagatggatgaagttggaccgttacgcgtattgcgaatcggcttagtcgtcggtgccgcattgtttgtaccaatggctttgactaattcgccttgggtactagcaggactgcgcttcttattagggattgctagtgcagggatgttgccagccgcacagacggtattaactttaaacacaccaagcgaaagtttcggtcgaatctttagttataaccagtcatttcaagcagttggtgccgtgttaggatcgttaatgggatcgactatttccggtttttcaaattatgcaacggtattctggctaactggatttacgttactgatcaactttgtgcttgttttgatttttgcttggggaatttcttatcggaatagataggttaagcatattcctaaagtatggaatttaaaaatgtaataaaagagctgtaaatatcacaaaaaaatatttacagctctttattattttcaattttttacgctaccatcttttcataaatgcgatacatccgattatcataagcgcacattgaaataacaagattatagcccgcgttttctttctgccacttttcaatcgcgtcaactgcgatcttagttgcatcttctgcaggatagccatacacacccgtagaaatagctgaaaaaattacgctatgcaatcccgctttctttgccaaagccagtgaattatagtagcaagaagcaagcatatgtgcatcactagtcttgccagcataaactgggcctactgtatgaattacatatttcgcaggtaaattatagccatgtgttatccttgcttcacctgttggacaaccatgcagcgccatacattcttcaagcaaacgtggaccagctgctctatggattgcaccatcaacaccgccaccaccaagtaatgaattattagccgcattaacgatagcgtcggctttcatcttagtaatatcgcctttaataatttttatatttttcataatcatgtcctcagaaatacccaacatttctttccacccccattctaacaccaacaacatcagttaggctcagaaagaatacaaagcatattgttatttttatattacgaacttgaattgatttctatctttagtatcctaatattaagtttagcgttataggagcaacgaaatgaaaattctacgacgcagtttatgcatcatttcgatcaccttattttcttttgctttgagcattctcattcctagtgttcaagctagcaaaacagttttagatgatctcatcatatttttatatttaattggaatcgtaattctgggcattctgttgttgtctaacaaatttgattacctatcactcagtctaagcataatcttgctactcgcaactatcattgcttggatcagattcccaatgattagcattatttatactttttttatcgcttatctaatcatgtgcttactaactattttcattgtcaaaaggattaagaaataaatttatgttttctaaaaaagaactaaaaatcatcaatactacattaatcatcatatatctgctttcagttggcccaacattcatcttcggttttactaaatcaaatgatttcacaagtactttctttttaattgcaaatatcattttagtttgtttattcattatcattgctatcagaattgctaaaatcaatttcaggctaaagacacaatattatctactaggcttcatcactcttatttcaataatagaactagcctaccctggactgacattaaatgagcgcattagcaattattttgctatcggcaatattattctaagcttgctaactactaaaatctcaaagaaattagtttaaatataggacacaaaatgaaatatctgaaaattccaagattaattaacagtattttgattactttacgtcatactgctataaattattgaattcttattactttaaaactacatcaggtattttcaatcattcaataaaaaataagactagcactaagccagtcttattttctattaatcaactattctttgggtgagaattgccatactgttccatcttggctacggtatgagccatcactcatctttgtaaatataaagacaacttttttcgtcctaattgtgtaaccgttttttgattcagttgtatcaactcggcccaaatcagccttaacacctgtttggggtggattatttttcttagtagaatatgcttgtaaaatttctttattaagtttagtcttcttttgctcagagttgttactatttttagcaactaaaatagcatgattctttgtaaaatacagatcaaaccaattacttaagcgattttctgtgttgtctactgttaatgttcgattaacccagtttttaggtaccgttgtttgattattgtagaaaaacattccaccaataactgctacaagtactgtaactactgcaattacggataacgtcattttctttttcataatacgtttcctcttaaattcagcattaattatttggcactaagcctctcgaaataagtcttacatttcctgaatacatgctaacccatcggtttctatttgttttaaaattgtgatccatccaggtactgtttctatacaaatagccactgtaggcaccatcattataataaaccttagacggagttgtattaagtaaattcatagcatcccctttaccccaactactatatctataaacattagatacatacttgtgaagtggagcatttttgatcggtccatagactttgactcccttagtttcttgaaccgtagtttctgatgcttgaacacgttgattatttgtagccaagactgtagctgcagttacacctaaaagtgtagcagttgtcaataatacttttttcatttttatttctcctcgttttgttctaattttaataatacttttttgcgagccgaagctggtgcaggaatgttcttaacatcataactgtatagataccctctatacagagtagtagcactttttcctactttttcacgcataacttttgaaagatatcctctatatccgttgtattcaaagtaatgagtgggaccataatcgcaacttgaacctaaagtgatccaaattctcttaggcttatagtaatctgctcttaattctgaacttacagttgattgtgtttcagttgatgcatcaactttgcttgaaaatgtaagtaaagttgtaccaactaatcctactaatgacaatgaaactagctttcttgaaattgatttcatttttatacctccgtaattatcaaatgacttatacaaattatctattctctttttctcccatcctttcaacacctggcttgacatttaatttaggtatttcaaaagtatctatactgcctaaaatgacaaaagccgttataattgtaagcgtaagtttgtttctttttcttttcatcattgaggtaatctttatgtacggtaaaaaatttaaagaaatcagaattaagcagaatatatcattagaacaagcagcaaaagatgttgtttcaatttcaactttatcacgctgggaaaatgataaattagacatcaatttttctcaactaaaccacttactcgcaaatatccatttaacattaagagaatttgctagatattgtgaaattaatccatccgatactttctcaattaaagctgcaaaagcatataattcagatgatattaatcagttgcatgcccttgctcaacaacaattagataaatactatagttccagagatagatacgatctatttttaacagcaattgctaataattattattttgacctgactcaaaaaaatattttctcgcaagaagatataaatcgattaaattatctattctctcatgttgaatattggtcagaattttacataacagtttttgcaaataccgtttttctgattaagccagaagttcaatatcaaatatgcaataaaatcttaagccagctatatttacaagatttttctagctgggatatttttattgattctattggttcaatattaaattcactaactagtttgattattagcaatcctagcctagcccaaaagctgttagaaaaaatcaataaattaccaattcctattcaatgcagctatatgaaaattagaagaaactttttagataaattacttcattatcgattaaataaagataacgaaaatgaaatcttaaacattatttcttcacttaagactcttggcctacctcagattgctcacaacttttctacactttttactcgtattaaagacttgtaatcatctccttcttatttttatgtttttataatactctcatatctatttcagcttcaatacttttgcagatttgcaaaacgaatttaaactccatacaaaaacgccttgcccgaaagcaaagcgttttttagcataagcaatttttgattaacccttatctgcacctgcagtaattccgttaacgtagaatttctgcatgaagacaaacaagatagtaattgggatagcgatgattacacacccggcaacaaattgtgcgaagtatgcagtcgcgttacctttagctgtgtgcaccatgttatacaaaccataagcaactgtataagtcttagcatttcctgaagttgaaagaataatacctgagaaaatgaagtctgtccatggagcgatgaaggcagtcaaagcagtataaacaatcattggctttgaaagtggcaaaccaatatgtaagaatacttgccacttagtagcaccgtcaatttcagcagcttcgtcgattgaccgaggaatagtatcaaagaatcctttagcaacgtagaagcccaaaccggcaccaccaacataaactagtaacaatccgaagaggtttaacatgttaagacccttcaagatgtagtacaaagcaatcattgacatgaagcctgggaacatccccaataccaatgcgatctgtaagaatggctttctaaatgcaaagcgaagtcgtgataaaacgtaagcaactgaaatagtcaaaaacgttgaaattaccattgaaagcaatgaaataactaaagtattaatgatccagttaccaaatggatattgtggattagtaaaaatcccaatatagttctgcaatgtgaatttttccggccagaaggtcgaaacgaatccagtatcattgaatgaaaaacttgctaagacgatccagacaatcggtaaaatccaaagaatcgctaaaacaattaataagatataccgaaagattaatgagagccgtctttgatttgaatatgacttcatgtctagccctccttaaatgcattagtacgacgatatgcaatcaacgaaacggttgcactaataataaagatcaagatacccaatacggcactggcgttataacgctgttcctgaccgaaggtcaagttatataaccacgttaccaacaagtcggtcgatccggcgccgttatacttactgttcatcggtgcaccacccgtcagtaagaagataacgttgaagttgttgatgttaccaataaattgttggataagtgaaggtgccattacaaatagaatttgtgggaaagtgattgaacggaaaatttgtgcggcattggcaccgtcaatcttagcagcttcaatttgatcttgtggcaagttttgaataatcgctgttgaaaccaacatagaaactggaataccgatccacatgttaacaagaataacggtaattcttgcaactaaaggtgaagcttggttatcaataaagtgaattggtgaactaatccaatgcaagttcatcaagatattgttcaaagcaccttggtagtccaagaactgcgccatcatcaaaagtgaaacgaattgtggtacagcccaaatgataacaaagattgttctccagaatcccttgtgcttgattccttttgattcaatcagaagagcgagcaaaacaccaaagaagaaagtcgtagcagtagctgccacagcccagatcaaagtccagcctaagactgggaagaaagtaccagctaagtcaccactcaaaacatttccaaatgcttggaaacctgtccacgagaaagcgattgggtgttgacgatcatagttggtaaaggccattgaaatcatgaagatcgttggcaaaatcgtaaagaacaagatacccaataatggaataaccatcaaggttgcgtgtaaccgagtatcaagcaaactcttaagttcttcaacgttagttggaatatggtccccatcacgcttcaaaatataattatgtctagttgagcgtaagttgacaatgtataggtaaatgattgctacacataagatcaaggccaatacaccgaataacaaaatcaaaactgagtttgatggttgcttggttacataaacgccttgtgcggcatcataaacaacttttttggttttaatagtacctaatgtagctaatgaatttaaagtagggataccactgaggataaaccaaacaataaagataatttctgaaagtaagagtgaaataccttttacccattgtttgtttgccaaggcgttactacccattaagaagaatgataacttggtagcaatgtcaccttttgaccaaacctcgcgatatgttgctttaggagctacatgctttttctttagaaacataacttctccccttcttaggcaaaaaggctggacaatttttatttagcccaacccttgcttatgcttttagcaaattatttcttttcaatgttcttagcgagcttagcaagttgtggcttgtattgtgctggcttaatcttgccgtcgtaagtaccactgataagtggagctgcaccattccagaatgcggccatttgtggaagcttaggttgcaatactgagttacctggcttagccatttcgattacagcttcagcaaccgggtcactcttaacagcacttgagttgacagcgctcttcaatactggaatttgaccagcgttcttatgagcaattaattgtgacttcttgttagtaatgtaagcagctaaatctgaagcagccttagcattcttggtgttagcattaactgcgaagccttcaataccaaggaatgcttccatttgtacgctcttaccaccaacttcaatcttaggatacttagcaactgcgaagttcttacccaagatcttcttgatattagcagcgttccaaggaccgtccaaaatagcttgtgcgttacccttcttcaattggttcaaagcgtttgaagtttgcattacacccttgttcttcttttgagctgcgtaccacttcaaagcattaacaccgttttgtgagttgaaagttgagcccttaaggtcttcaccattcttaccgtaaagtgtagtacctgctgagaacattactggccacattacgtaagcgttagtaaagtcggtagctacaacaccctttgaagttaaagtcttccagtccttaacgtcgttagctgataacttagacttgttgtagtaaatggtttgagcttgttgtgcgtatgggaatgcgtaaaccttgcccttccaagttacaccctttgaagcaacatcgacatagttgtcttggatatccttagttgctgatggtgaaagtgggttaatgtaaccagcttcagccatttgacctaattgatcgttaggaacttcaaagacatcagcagcctttgatgggtccttaccaacgtctgtcttagcgttagctgaaccgttaggactttgaactacacgaaccttaatattcttgttcttcttagtaaagtccttagcaatttgcttgtagtaaggaacttgttcagtatccacccaaagagtcaagttagccttcttgtttgaattactgctacttgatgatgaattacttgagccgtttgaacatgctgctaatgataatgcagcaagaacagcagtactacctaaagccattttcttccaaatcttcatgactttttcctcctaaaaaatcaaaacaataaacaattcttaacaacagtagcttctgctacatatggttgtaagcttaattaatcaaatttgtactgcgttttcagtacaagagttagttcacaattgccttggtagaatccttgtcaaagaagtgagctttgttaacatcaaagcccatcttgaccttgtcacctggcttgtgataatcacgtgaatttacaatagcagtaaattcagtaccatcaacttcttggtgaatctgaatagttgcacccaaaagttctgaaacaacaacatttgattcaattactgaatctggccaggtttccataaatgcttcttctgagtgaatgtcttctggacgaataccaaagactaagtctttgtcgttgtagcctttttcttccagcagttttgccttaccttcaggaataccaatattcaagcctttgccatcagaaattcgaccgtccttgtagtgaacattgaagaaattcatttgtggggaaccaataaatccggcaacgaacatattaactggcttgttgtaaacttcaagtggtgagccgatttgttcaactctaccaacagacattacaacaactctatcagccaaagtcatcgcttcagtctgatcgtgggtaacataaatagttgtagtacccaagtcttggtgaagtttagcaatttcagtacgcattaccacacgcaatttagcatccaagtttgataaaggttcatccatcaagaagataggtgccgcacgaacgattgcccgtcctaatgcaacacgctgtctttgaccaccggacaaagcacctggcttcttatccaagtactcttcaaggcctaacatcttagctgcttttttaaccttttgatcaatttcatctttaggcgtgtgacgcaactttaaaccgaaggccatgttgtcataaatggtcatgtgtggatacaaagcgtagttctggaaaaccatcgcaatgtgtctatcctttggagcaacatcattcattaccttatgatcgatttccaaagtacccttactgatgtcttccaaaccagcaaccattctcaatgtagttgacttaccacagccagatggaccaacgaaaacgatgaattccttatccttgatatgtaagtcaaagtcgttaacagaatatctgtcgttacctgcatattttttgtaaatatggtttaaatcaacctcaaccattgtttcccctactctctttaattatttttcattaaaaactttttcaatttcactcaatttcaactcagcagttgttggaacgatgtaatcagcttctttcaaaagctccttatcaccaattcctacggcaaattgacctgcagccttgattgcttcgaccccagctttggcatcttcaaaactgattacttcatcagcctttaaccctgcaatttcttgcgctttgatgtaaatttcaggatctggcttaccatgatgaagtgttgctggatcaacaatgccatcaaattcatccataatacctaatctagttaaaatcttaggagcattcttagaagcagaagcaattaccatctttaagttttgcttcttagcatctgccaataactcagggatcccaggcaaaatgtcctttggcgtcattgtttctacttgttcaacaaatttagcgttcttttcagctgcgaacttttctttttctgcttcagtgtatttgtcttcttgaccaccgtacttcaagatcaggttaagtgaatccattcttgaaataccacgcaagctatcaagttgagcatctgttaaggtaatgcctaattccttagctaaattgttccaagctgtaaggtgaaacttagctgagttagttaaaacaccatctaaatcgaataacaatcctttaagcatttgtagtttcaccttctttaagagtaactttcttatcgtgaactaatacatcaatatcttcacccttaagcaaagtaagcttagttccttcatgatcaacataaacttcgatcaagcgaccacggtagttgatcttgaagctgtagtgatcccaaccttcaggaacaaatggattaaacttcaattggttgtgatcgtaacgcatgcctgcgaaaccttgaacaattgtaagccatgaaccactcattgaagtgatgtgcaaaccatcaacggtgtcgttgttgtagttatcaaggtcaagacgagcagttctttggtaaagctcaacagccttcttttgcttgccaagttcagcagctaagattgagtgaatacatggtgaaagtgaactttcgtgaactgttaatggttcgtagaagtcgaagttcttttccttttgttccatagtgtattcatcgttcaagaagtagataccttgtaaaacatcggcttgcttgatgaatggtgatctcaagatcttgtcccatgaccagtgttggttaattggacgttgatctttgatttcgctaactggacgaatatccttgtctaggaagtcatcttgttgtaagaagatgcctcgttccttgtcttctggtaagtacatgttatctacgatgtcttgccatttagccttttcttcgtcagttacgcgaactctttcttgagcttccttagtagcaagtggcaaacgttccaaagtgtatttgagaagccatcttgccatggtgttggtgaaccagttgttgtttacgttgttttcgtattcattaggacccgttacaccgtgcattacgtacttgttacgccactttgaccagtgaactctagctgcccagaatcttgcggtaccaactaaaacgtccataccttcgttcttaacgtagctgtcgtcgccagtgtaatcagtgtacatagcgattgcgtgaggaatgtccgcatttctgtgaatttcttcaaaggtgatttcccattcattgtgacattcaatcccgttgaaggtaaccattgggaacaatgcacctggtaagccttgttctttagcgttatggtatgcgcctggcaattgatcgtgacggtattgtaaaagtgcccgagtaacactaggatcagtaacacataagtacattggaacaatgtaggcttcagtatcccagtaagtagcaccaccgtatttttcaccggtaaaacctttaggaccaacgttaagacgttcatcttcaccgtaataagtcatgaataattgacaaatgttaaagcggataccttgttgagcggcatcatcaccagcaattacaacatctgatttgtcccagcgcttttgccaaacggcttcatgatcagctaagttttcttcaaaactcttagcttgaagcttggtcatcaattcagctgccttagcatcttgatcatctggtttgacgtcacgactagtaacaacaatgacatctttttcaagatcgtagctttcgccttcatttaactcaactgaaagcttttcatgaagttgggctgcttcagttgaaacatcacccttaactacttcaccattatgacgaagactttgcttaaggaggactgtaaattgtggaaccttgtatgggttagccttagtttcaaccttaatagttcttgcttcagcattttcacctaaaggcatccagaattttgcatcgtagttactgtcttcgttaacaacagttccatcaagtgctgcatcaaagtcgatcttagctttaccacttaaaacggtagccttaactttaattaaagctgcttcttttaaggtaatatgtaaaaacctttcgaattcgaatttaaccttagtatccttaccttcataagtaaaacttctagtcagaagaccttggtgcatatcaagtgctaagtagaaatcactaaacttaactttagctaagtcaagtttttcaccattaatcgtaattcccatgttgatgaaacttggtgagttaggaaccttaccaaagtactttggatatccgttcttccaccaaccaacacgcgtcttatcagggaaccaaacaccagcaaggtaagtaccttgtaagctgtcacctgaatagccttcttcaaagtttcctctcatacccatgtaatcgttgccgattgcagtcatactttcttgcaatcttttatcttttggttcgaacttatgggtaacgaccttccaaggatcaatttcaaaaattcgtttcatatattctatctcccgtaatattcgaggttctctcttgtttacgctttcattatcctttagttgaaagcggtttacaatattaaatctgctgttaccgttatcaggattagttaatagaaaaagaaggtagatcttaatctgccttctttttttgcttattaaaagtaacttttaatgaacactcactacaaagccttttggtgccaattgattattctcataatcttgactaaacgtgttctcacaattgatctctactggatgatcggtcgtgttaaagtatgctttaatgctttcattcccctcacgatcgacctcaattaacccattctctgttacgtgtaacttaattcgacctttaccgaaagtttcatcatgttgcaaacgaaagtcaatcaattgatgaactcgttgccaaaccggaccgtcttcttttgcccaatccattggtttacgacaatcaggatcgttgccaccagtcatacccatttcagttccataataaatgcatggactacccttttgcataaattcaaaagctaaggcttgcaaagccaaatcttggtctccattagctactgtcaaaattcgggctgtatcgtgtgaatcaagcatgttcatcatggctgcattggtagcatcgcgatatttcatcaactggtctgtcaaacgactagttaattcttgtgctgacagcttatgcttgaaaaagtgatcttcaatctgcaatgtatatggataattcattacgccagtaaactcatcaccgttaagccatggacgagctgagtgccaaacttcacctacaatataaaagtctgacttgatatcagtaacagccttgtggaatttcttccagaagtggtgatcaacttcgttagccacatctagccgccaagcatcaatatcaaagtattttacccagtaagtagcaatctctaacaagaaatcctgtacttctggattagctgtattcaactttggcatatgcttttcaaaggcaaaagtatcgaacttaggactaccctcaccctttaatggatcgcggtaaggttcaactggatattcattaatgtggaaccaactagcaaaacgagaacttggaccatttttaacaacatcttgccattgcattgattgatcacccaggtggttgaaaaccgcgtccagcatgaccttcattccgcgggcatgagcttcattaacaactttcgcaaataaatccttgtcgccgaatgccggatcaacttgcaaatagtcaatcgtatcatatttatggttagaactggctttaaaaataggacagaaataaaggccattaacacccagtttcttcaagtaatctagatggtcaagcacgccttgcaggtcaccaccatagaagtcttcgcggccaggatgatcctccggattccacgctttaaccccttggggatcattagacttatcaccgtttgcaaaacgttctggaaagatttggtaccaaacagtatgcttaacccattctggcgttttcaccatatcaatttcatggcaatatggcactttgaaataagaaccatcttccataatggccttgtctacatcactgctaattgcacgatcaccgacaactacactagtgccatcactgccaattacttcaaaggtatacttcaagcgatgatatggtgcttcaagcgtaatgccccaatgatcttcacactgccctacgccaattttttccatctcacatgttttagcctgttcaagtggcaaataattatcgcagtaatgaacaattacttttttaacgtcatttttagcactgtgaaaacgcacgcgaacatgacttggatcaactacaaaactatcttcactttcagttcggtgtcttaaagctgctaattgcatatattaattctcctttttcaacacaacacctgcataaggcatcaaagttaatttttcattagttaattgatattctcccgcttttagtgttgcaacagtataaccggctggtatttcaacagttgtcttttgatcactcaatgaaacagctacaatggcactttcatcatgtaaatcacgttgataaacatagctattcttatccgttgaaatcatataatacgttccaatctggaataaggcttcttttttgagttccagcagttctttgtaaaaattaaacatgctggtggtatcgttaatctcattagctacgcaagcatcatcctgtttaatacctgttatccatggtttaacttcactaaaaccatggttctcagttgcatcccacggcattggaccacgggccggcaatttatgtgtttcactaaccatagctaaggccgcatctttgctcaaaactttttctgcatcctttaaccatggcgctacagtttgatcttcgaattgatctgcactagtgaaatgtagattctttaaccctaattcttcaccgtaataaattactggaattccgcgttgcaaatacatcaacatcgccaagctcttagcctgagtctgtgttctagctacgcgtgtagccaaacgggccatatcatgattattccaataaagagtaggctgcgatacgcctgctaatgtttgttgccaaaccacttgattttgtttaaaggccgtcaagtctaactttttaggctgatattgctttgaaaaacgctgatcacaattagaatcatcatcggtaaagtaccggaaggtaattacactatccattaggtgattacgcttagtcgtgtaatcaacagctagattgacactagcacttgcagcttcacctaataaaagcgtatctggataatcctgcttaatctgctcacagaaaggccgcatccattcctgcacctgtggtaagttagcgaaaaatggttccgcaacaattggcttgttcacgtccccatctccagttggataattttgtcgcaaatctgccttgccaatatggataaaagcgtctaaacgcaaaccatcaattccttttttcagccaatactctgccacttccaacatagcatgccgaacttcgggatttttccaattcaaatcaggcatccgtttatcaaacaagtgaaagtaagattgacctgtgcctgctggatctggctcccatacactgccaccaaagaatgaaccccagttattaggtcgcttgccatcatgaccagcgaaaatatagtagtctcgataaaggctatcggggttcttgatggcatcttggaaccaaggatgttgatcagatgtatgattcaagacaaagtccatgatgaggtggatccctgccttatgcaaatccttgattaagttttccatatcttccatggtccccatatgaggatcgattgcgaagtagtttgaaacatcatagccgttgtctacttgtggtgaaacaaacacaggattaagccagacggcgttaactcctaaatttttcaaataagggatgcgtttgcgaataccattaaggtcaccaacgccatcgccattgctatcttgaaaagacttaggataaatttgatatataattgcgtgatcgtaccaatgtgccataattaatttcctccacgcatagtttaagggaaattagaaaccgttttcaacatcatatttattgttagcggtatcaaaaaagcacaactcaaatttgaattgtgctctttgcttacttctttttaaatatcatgttccaaaccacttgctgcctttctcctgcaaatcagccactggctgcgttacctcaatacagccaagatattttccttgatcattatgcaaactataaaaggcaatgttcaccggaatcccatctttatgaatcataatcgacaatttaccacgtttgccttcgtgcatctgctttaaaactgccttaacatgaccttgactgtgaccgggatgaacttcaaagacagttttgccgatatctttttcagttcgcttaaataagcgatgtttattcatcgatgaccaaacaaccacatcgttttcatctaggacatccatttcctgaggaatagtctcaaagatagcatttaactgttcgacacttaaactgccgcctattaattcgattttatctgtcatttactttgctaaccttataacttcacgggcaatcatcaattcttcgttggttggtacaatcaatgcttttacttttgaatcaggcttagaaataaatttttcaccgtctgttcgattagccttatagtctggctctaagccaaggtagtggagtgccgacattacacctgcacgaacacctggatcatgttcaccaatacctgctgtaaatacaatgccatcaataccatccatctctgctgcatatgcaccaacataacgtacgacacgatttacgaaaatctttcttgctaatctagcatgctttttcttacttgccaacagatcacgcatatcagaggaaacacctgatacgccaagcatccctgacttatgatttaacatgtctactgcttcttctactgtcatactggtcttttgcataatatactcaagagcagatgggtcaaaatcaccactacgtgttcccattgctaccccagttaatggactaaagcccattgaagtatcaagtgatttgccgtttttaaccgctgtaactgatgcaccagaacctaaatggcaaacaatcaacttaagcgtatataagtttcttcccattagtcgagcagtacgtggagctacgtagcttactgaaataccatgtgcaccatattttctgatcccatatttctcataatacttataaggaattggataaagataatacgcgtggtgctagttaaatcgttctaggcaatatgccatattataagctaaaatggctatttctagccgctgctgaaagccagctaagctccttgctcggttattttcagcgttatagtaactgagcaaagaaaagtcgctttcaattgttcttctaattgccatcagttgatgattattatgttttttagcacctttcatgttttttcgatatggtgtccaaaggacatagcccataccttttaactcggcagctaagtcttttcctaagtagccttcatcgcctaaaagataatggttaattggatgagcattaatcatcaattctgtcgtttctttggcatcatgcactgatgctttagtgactgcgtagtcaagcaaatagccatcatcgcttactagcgcgtgcaccttgaaaccataataatagactttcttggttgctttatagccaatatcggctatgtcacggaagatcttaacacgataattacgaacaggctgacaaactggaacaggaaaactgtcaataattaaaaattctccagcaacctttacctcttgattccaagcttgacggatgcagcgaattaaaggcaaaagcatcttggctcgacgattaaagcgagaatgagataagccaacaaaaaatttacagaatcttctttgggattcaattccaatttcagtttgccaaatgagcatcgctaagatggagctgtcggaaagctttgtttgatcaatgttttttcgatgcgtaagcttatcaggcgcataaagattatatagtgaacgacaaattacatttaaacgactaaaactaacttgtaaatggtgagagaaacgattaagcttgaggtagttcaattagatcagactcttttctatttaatttacttacaacttgagtctaatccgattggacttttttattaactaaaacgatttaactagcaccacgcgtaaagataattaacctgatcaagactagtatgatatgaagtatcaaacactgctacttgtggcacatccgggataatcttcataaatgccttaattcccatggcttctggcacattatgcaatggtgctaattcacccaagtcaaaaatttgttgaagctttttttcatcaattaaggcagactccctaaaaactttgcccccattaactactctatgacctacgcctgctagttcatccagactttttaatacgtgaaacttctttaaattttcaattaataagctaacagccgcttcctggtctggaatcgaagtatttttaatatattctttgccattcaacttaattttgaaaacagcattgtccattcctacacgatcagccatccctgaagcgataaccttttcgtctgggaataaaaaaagcttatatttaaatgatgaactaccagaatttattgccaaaacttttttcataatcgtgacctctattcatattttatctcttatttttagtatagcgctttcacctataatagaaaataattttaaaagcagttaaaaagcacctctgagttatcagacgtgctcgttattttttcgatttatctagttgattggcgccgaattagcttaggtttgagcattacttcaccttgaggtgaacccgattgggcaatcttttgcagtagcattttagctaacatttcacccatttcaaaaattggttgtttaattgttgttagctttggattagaaacttgatctaaaaagacaccatcaaaaccaataactccaaagtctttcggaattcgagcgccttcatcttgcaattgccgtacaacacccactgcaattcgatcactggcacagacgaaacaagtatcttttttaaattccttaaaatgttcatgaatcacatcttgcgcagcatgactatgattagaaacccgaaaaatttgtggtatcaactggtgttgttgcaaagtgttgatataaccagcttcacgtgaatattcaaatggctcttttaaatcaattccaataaagacaatgtgcttatataaccggtctaaagcatattgagtagccatcttctctgctaactgattatcagaatcaacaaagtcatagccgcggtgattttcaccaaataaaacaaaaggcttatcgagtttatcaaataattcataatctttgtttcgcgccccggtaattaaatagccatctgcattttccttttcaatttgattaggatccgtaactaattgcatcgcatactgcttagtatttaaaccacgagcaaaaccaaaaagcaagttcatatagtatggctcagtggtatcaatatcttctaaagtgacgaattttaccacgttagtccgattattaactaaagcctgtgcaattgaattgggatggtagtttagtttctccattgctttttctaccattgctcttaattctggcgttacttgctcaggatgattaatcactcgtgataccgtcatttttgatacatttgcttctttagcaacatctgataaagtagtcatattattcctattctaagtacatctttctgaatcggtttaaatctttttggctaaagccaagctcttttttgaaaaatccatcaaaactgccccagccttggcgaatagtttccgtaattccacgaatagccggtccctctcccttggtaatattcattttagaaactaggctagcaatttcattatcatcggggaactgtttagccaaagcaaagtcatacaattcattggtcaataaataatcacgcgaaatggtgtcatcatcaacacctaatgcagttaagatcagtgctgaagtcattccagttctatctttgcctgcactacaatgataaactagcgcatcttcttcaggtaattcaatcaattccgcaaaaattttagcaaattcatgttgactatgtgaattaagcaaaacctgctggtaaatttgaccaagccaattgtcacccatatcaggaatatgatggacaaagcgatataacttgttatcgcctttattttgcttgcggttttcagaataaatatgtgcatcaacaaaacggacatttgaccaaagcttgtcaggcgctgaattttgttcatacttagagcgtaaatcaacatctacggtaattcggcgttcaactaacttttcttgatcttccttcgacaaggagctaagtgaatcagaacgatatattttgttccactttacatgttgacccttgtcattttggtagccgccgatgtctctgaaattcagcggtccatccaaagctaatattcgatcatgcttcatttttccttgcctttcctcattaaagtgttaataccgtacttttattatatcattatcagtcatgtgcaaataaccgagcagcacgaattgcacgttgccaacctgaataaagtttttcacgttcaactgcactcattttcggctcaaaggcctgtccaatcgtaaaggtatgctttaactcgtcaatatttttccaatagccaacggcaaggccagctaaaaaggctgcacccatgctggttgtttccagcgttttagcgcgttcaatttcaatccctaaaatgtcagcctgaaactgcatcaggtaattgttgttgctagcaccgccatcaacacgtaaagcaggaatttcaatgcctgaatcttgttgcatcgtatcaacaacgtcacgggtttgataagctaatgactgcaaagttgctttaattatatccttgtcagtagttccacgtgtaacaccgaagattgaaccacgagtctccgcatcccaatatggtgcgcctaacccagtgaaggcagggacaacgtaaacctcgttctctgatgtcgactcaagcgctgcttgttcagagtctggcgcatgcttaatcaacttcatcgaatcgcgtagccattgaattgcactaccagccacaaagattgatccttctaaagcataagtaatcttaccattaatgccataaccaatggtcgttaacagattattgttagagtctgttggcttgtcccctgtgttcatcacaataaaggcaccggtgccatatgtatttttcaccattcctggtttcaaagctagttgaccaaataaggctgcctgttgatcaccggccatcccagcaattggcacttgtccaccaaagaacatatatgacgctgtttcaccataaatctctgaattcgagcgcacctcaggcaacattttcttaggaatattgagcaaatgcaaaatatcgtcatcccacttgagcgtgtgaatattaaacagcatggtccgtgaagcattagtgtaatcagtcacgtgtttagcaccatcagttaacttccaaactagccaactatcaatcgtgccaaaaagcaactttccctgttcagctttttcttgcgcgccaggtacatgatcaagaatccagcgaatcttagttgcactgaagtatgggtcaataattaagcctgttttttgacgaatttcatcactgtagccttctttttttaatttttcagctaattctgttgtctgccgtgactgccaaacgattgcatgataaattggctcacctgtatccttgtcccaaacaacggtcgtttcacgttggttggtaatgccaattgcggcaatttgattaggccaaatgcccgaattaataaaagcattggcaattgttgtttggaccgccatccagattttattagcgtcatgttcaacccagccaggctctgggaaatattggtgaaattctttttgggcagaagcaacttcacgtccatcatggtcaaaaataattgctctagtagaggtggttccttcatcgattgctaaaatatatttttctgtcatagttattctcttttctgcaaaagcgctttcttataatattactgtttttctaatgcagattctagcagttaatgtaatagatacggtataatttttataaggattttttaaggagggcattttaatggaaaaaaatcaaaaaattgcggtaacaattgcgggtaacgatagtgatggtagtgcaggaatgccagcagatttgcattcattctatgcacggggcgtttatggcatggggctgatgaccgcggctgtagctggtaatacaaaaggaatttttgcccaacaaattatgccgcttgattttatccaaaagcaattcgatgtgttaaacgacgacttcaagattaatgcgactaagacagggatgctggctaacaaggaaattatagattgcgttgccgataatcttgaaaaatacgacatgggtaaaatcgtgcttgatcccgtcatcatcactaagcacggtgccaccctacttgatgatgatgcctaccagaccttcttagacagattattgccgctagccgatgtaattacgcctaacttttatgaacaacaaaagctaactggcttgaagctaaataataaggaagaaattcacgcaggcgctaaaaaactacaagagatgggtgctaaaaatgtcttgatgaagggacgtcatgactcagataatcagactgaagtaactgatattttgttgactgaagatggcgcatttcacgaatttaccaagcctttctttaagactgatcgcgtgaatggcacaggtgatactctctccgcagttattgcggcagaattagctaagggaaagtctgtaattgatgctataaaaattggtaaggactttacttacgctgcaatttctcacccaattgatgttggttcaaaatggggtccgatcaatcacttggctgcacaggaagaaaatagatagaaaaaacaccgaagctcagattttgagcttcggtgtttttatgtctgttttcaattaaatcattgctgtgtagagatacagtattacacaaataatgaacgctattacgtatcccatgattatgctaataactcaatgaatatgatgatgttgcatccaagtagctaaccagtcgcccaggactagacaatatgatcctactaaccagtaattgatctttttctgattaattgctggtaatggcaagattaagattattattagcgctacagctaaaatatatttcaaggctgtatagagtttaggacttagtaatgattcacgcaatttattttaccttgtttcttctaaatcatatattcgatttccattaatttttggatttacttatttcttatagctcttaatgatccaaaatataccaagcataataaaaaggatcgataatactactagttgcataactggtttatatctaagaacgcatgaatctattagaaataccacaccaacagcaataattgtcattccagatattttgctttccttttttataataattacttaaacttcccacatcaaataagctggcaattctttgatattgcttagctttgggcttctatactatttttgctagttttctttaacaatttttgcatgtatttgggtaaacgattgataaagtcagccgtgaattctgctatttgtgcttcactggcatgaaagactttttcaacgctagccaccattgcttttgtgattagctgaagtgaatgactgaatgtaatatccgccagctcatcaatcatgcaatagaaaagctcacctaaggttcgctcatcttcgtcgtcccgcttggctactgacatgagcatatagcgggtaaagactatagccacatgagcagtcaaggcatcgtaggacagaccatgatattccgtgcttagttttaggtagcttttgcaggttttgaaaaaaacttcaatatcccagcgtttgccataattgcgaatgacttcatcttcgctaagcgacatgtcggtacaaataatagccagccactctttacgattggcacggtttctaacgcaaattatccgagcgtcaattttagcaccgtctttgtcttggcggccaaccttgactggaattgacaacagatagcgcgaacgcccgcgtcgctttttacagctacgataaatctgtttgatgtttttgcgttctccttcaaattcatatttgattttggagctaactttaaccatggcaattacatccagcttcctttgcttgagctggacgatttgatgtggatttgagaaccagctgtcaaacagcacgtacttggcttgatgacctgctttcatagcttggtcgattaaattaaccatcacgtctgtgcctttagtccgggcaagcatgcgtcttttgccagcaatggtgcgctgatcacagactttgttttcgccaatcatattctgtagcttgtgagaggacagcaacaccgaattgattggcatgaaagaagctccatcagtccagcccagggtcatcatgcgaaaacctttcttgtaagtcattgatacatggtcaaaaactttggcgactaattctgttttcttgaagccggtcctagagaagtaggaatcatcgacaacaaagcaatcagcccgtttttctgaagtcaaagatcgcaagtgattattaatgatttgcgcagaaagcagtgtggtgaagtggagccaattgacgtggacgttgcgcataaatcggtaataagaatttttagaaaagctttctttaaaatgatccgttttcagctgcatatataagctgcggtcacgaaagacattgcttaaaacgtaaagaaacaagctgaacaggctaatgcctttttccttgcggaagccacattttctcaacagcttgatcacctgaaacttcttgatgaagctgatgattgagtttgaaaatagttgttcatttttttggtcaggagatggtaaaatagacattggcacaagcctttcatgcatagaattatcgtttggtcactttaattatagcaatgaaaaggtcatgtgccttttatatttgttaaaaaacgcagaatcacaataaaaggagcgattctgcgtgtgggaagtttaagtaattattacaacagcaattaagattactactgcagttacaattgaagcaacgtcgacttgcattaacttaagtttttccttccatctaagtcttcaactattattttaaatcatgtaagttctcctgcgattgactttgtatcatatttgttacaaattattactcagaccaactagcaataaagtttttatagcctaatacaccaagatcctgtctaatctcttttgttttgtccttttgatccaaaaataatgctttcatataaaacacttcaattctataaatcatcaaatggagactgtaaaatagtttgtgtaaggatgaatgattccttaaatttatttctttaaacattagaaaaaggagttcctttctcgtatgattggtttgaacaaaaaaacacatacagaaagaagaactccttcatgaatgattttaccaaagattttgctcaagctctattcaatccagacaaaataaatgatttattgcgcaaagagctacaacaggctgttaataacttgttagaagctgaattgactgcctttctgggctatgatccctatgccagaaatggctggaatactggcaactctagaaatggtgcttatttccgcaaagttgatacgcaatttggcccaattgaagtgcaagtgcctcgggatcgcaacggtcaatttcatcagcacacgctgcctggctacaagcagcactcggatatcttggaaagcatgattatcaagctttactccaagggcgtgaccaccagggaaatagccgatctaattgaaaagatgtatggcagccattacagtccagctcaggtatcaaatatttccaagcagatgattccaaaggttgaggcttaccacaaacgcaagctaagcgacaagtttttctgcgtctatttggatgcgacataccttcctttgcgccgagaaacatttgagcgtgaagcagtctatattgccattggcatcaagcctaatgggcacaaggaggtcattgactactgcattgcacctagcgagaacattgaagtctggacagatatgcttcaaaacatgaaatcccgaggcttaaagcaagttgagctttttctttctgatggtgttgttggcatgaaaacagccttggccaggacttatcctaaagctcattttcaacgctgtttggttcatgtcatgcgcaatatctgcgctaaagtacgcgtcgacgatcgtgaaaagatcatgaatgaattcaagcaaatccatcaacagccaaataaagaagctgcgatcaaagtcttgcacgccttctatgacaagtggaacagagcgtacaaccatgtcatcagagatctcaaagagattgagcctgatctgctggtcttttacagctatcctaagcagatcagggcttcaatttactccaccaatatgatcgaatcctttaacaacgttatcaagcgtaaagctaaacctaaagcagagtttccaaatgaacagtcgcttgatacttttattggcattcaagcaatgagctacaacgaacgctatttcaatcgaatccacaaaggcttcggtcaggttcaggataccttagaatcctactttgattaaataaaagattaaaaaatcaatctacgagaaaaatctatttacacaaaagatttgacagtttcatcaaatgaaacgacccagtagcattaataatatattccatcacatcatcaatatgatcaaaatgtgtcagttgtttatgaacctttctgtcgtaacaaaccaccagataattttctagcaatcttaaatatctttcagtcgttaactctgaaagctcagatttgtttgcaaaatcaagcaagcgcccaattaaaaagtccaattcatcttgtggccacatcggcatcgtattaaccagtaatctcaacaggtctggtcgctcaagccaattatttccttcatcaaactcagcttttattttcttcctgatttctacatcaatcttgtcagtcttccccttaaaatatgtcaaagtaattagtgctcgcaactttagaatctcattattagatgaattcattatctgctgacaatacttatccaaagcttcagtatctttcgcactaactgcttgattcattttagtttcaaattgcttctcaacttttcgttcttctaacgtgtagtcatcttgaataagatcacaaaattctactaaatcaatttgatgctcaagcaatatttgaaataagctttctgcatttatgcgatttttatcgctttcaacttttgcataaaacggtcgactaagaatcccttcgcacatctgctcttgtgttaaccccaacttcaatctttttttacgcagtgcttctccaattttcatagcaagcctcctgtacaatttttaataaaaatagcactttatactttttagtcaatgaaaaaagccgccccgagggacggctttgtagtggcgtagcatgctacgaatcaacgtaggagttggtcaagcatatgctttaatcgcttcttaagagctttcttaaagcgcttgatgcttccgcggtcaattggtataactactagtacgagaaagatacaccacttcacggagaatacacctccttctgcacgtaaagtaaaggcgctaccctttgtgacgtgcattttaattttatcatgatataatacagttagtacgagaaagtatgcacgtgatgtgcgtgggctactagctggtagctcaaaaattagcagggcggtcgaatgaccgtcttttttgtgcaaaaaaacagcaacgaaattaatcattgctgctaatttacttacttctttttctcaatcacaaaataatatcctgctgtcaaaatttgagcaattccttcaagcgtaattgccaaatctgcaccaaaacgcgctacaatcagcccgcctaaaaacgagccaattggaagcattgatgacagaatagagtcattaattgtttctacttgacctaaacatacctatcttttttagtatatggttctatctataaatataactaccatcgggataaaacgttattgctcgcttatccttgtaggactcaattaatgcattgattgaatttttatctttgaatcccattctttttgctaaataattttgcgtcctgcctgtatccttacaaagggaatttaatgttctctttagatacttaaaatcatacttcttatttaaagaatacattaaatctaaaagagatattattacaattgctaatctgtgaggataattaccattatccatattcaaatatttgcgatattttgtagcgactttaggcatggtcttcaacgaaatatctaccaaatctccattatgacaacatatatttctaattaaatttagcaattctaaactttgaattagacttttaatatctaaatggaataatttctgactaatttctttacggttatcaggtagcatcaacttggctaaatatatactttgcccgaatgataaagtatttaccataagccaaactgtgggaaatattcttgtacggtccgttcgttcaaatttttgaacatctatatagttagactttttcacttgatgctgcaattgtgataaaaaagccagttcttcattttttatcttatacttatctatttttacgcccataattcttccacgacgtttaacagtacctaaatatttatttcttccactattttgacaccacttttcaaagtccaaatataaatatgggtctgtcttacctaaaatataagagatttcattgttcaatgcagtttctatatcaccaattgcttgaaaaatttcttgctttaaacgttgatctctatagtatcttttaaccaattcatcaaagctaatacccatatactgattattatcatgatcccaaaatgcataagaatactgtttcaatttataatatcctattatttttaacgtattaacctgcttttcgaatttaatgctattttgatcaattccagtgattccttttttcttaaaaagaaggacttggtctacatatgaaagatgatgctccatgattttctccataaaaaaaccttcgctgatggataaatccgtcatcacgaaggtatgatctatcattattatacaagatttcccaaaaaaatgtagtatttagctagtatttttatcgaacgtatgattaattatatagttatttacatttcaaagcaaacagtagataaagtaagaaaaaaacagttacatgccataatgtaaacttagagatttttagcaatctacatctatgcataatttttgcatgaaaacagcaatgatgagtgtattttaatttacttctttttcccaattacaaaataatatcctgctgtcaaaatctgcgcaattccttcaagtgcaatcgcccaatccgcaccaaaatgcgctacaatcagtccacctaaaaatgaaccaatcggaatcattgacgataaaatcgactcattaatcgtttctactctacctaaaatatgcggactaaaactctcctgcaccaacacttcaaagttaatattcatcatcacaatccatagttcagacgtaaaaaacaaaatcaacagtagaaacggcatccctttgggaacagctggctcaagaacaattgctaaacctgataacgtgagacaaatgacgactagccttttaatcttgcttttatcaaaagttagtcgctgtaccagtacactgccaactaacccacctattgaagaagctaattctaaaccgccatagctaatcgctgatttagtcaaatgctcagtcgcaaaatatggcaagcccacagaggaaataccataaaatagattagtcactgcaaaaggcatgatcaagcgtgctattttgccttcttgtttcagagtttgccagcctttaagcaaatcttgccaatagttttctgtgaaatattcattcgacttattcgaaagtaataatttcctagacaatattagtcgcgtataaaaagctagggcgcttgcaaaaaatactgcagaaataattatcgtggaatcaagtgacacccaagtaatcaataacgttgccgctgcattcaaaaacaaatccagcgttttataagtcatttggaaaacgccgtttactttagttagctttgcttttgaaataatgactggcaaaattttttcttcagcaggataaatcaaagttgagccaatcgttgaaatgacgtatatccctagcaaaagccaaattgttaaatcttgccacagtttaatttgaaacaacaacgccgctataacgctgtccactatctgcactagcgttacaagcttaagtagctttttaatatagacacgatcaatcaacggtccgaagacgaacgacaacatttcaattgatgagtctgcaacaaagattaacgataagataagcggcgaatgaaagcgcaccttgaaaaaccacaagatcgccatgtaaaacaacgaatccgcaatgttggttaacactcgtcctgctaataatcgtctgacattgacattttctttttcaattaagttaaacattttcccattccttttcacaacactactaatgtcgctgaaagccagggaaaattactatttagttttagtttaaaatcccagactttcagctaaaaatctgggttgagccttaagtagcgtttgacgaatgaaaggaaataattcattcgcaaacttaaccctaaaatgtcgcgcattttagtcctcgctttctgtggaaattaagatcattatagcatgaacagtggcttatcaataatagtcattctatccttatatttttcgtattttcattcaatttcagatcatgacttatgataataaccaaattaacttgcgctatttcctgcaatagttttaataaatcactttgtaactcaggatagatatttgccaacggttcatctagtaaaaaacattgcgcgccagtttttaaaacagcagaatataactttactaactgtatttcacctgttgatagttcgctcatctctctatctaaaatcttttcaattctaaattgtggcgaatcaaaaacttttgcaaaatactcgcttttataaacctgacttttatcagaatatgatcctaaatagtccctcactgaacaattagggagtggtatatcttgaaataaacaacttatgttcgattctctcagttttcttttattaattaaatcagcatctataccatttatggttatttttccttcctttttcggcgtgtataggccaattattgtcctaagcaaagtagattttccaattccatttctgcccctcacaatataaaatcctggagtaacaaaattggcagaaaaattttgggtaaataacggtgttttttcatctaagtaaatattaaaatcatgtacttgaatcaagtttattttagagattatttttctaccatcttgttcattcttcatggttagtatattgttgattctcatccacgctactttaaatgattcaaatttaaataaaatagaaaaaatttcatcaacctgtcccaaaagttgattaaaatattgaaaaataattgaaaaggaaccgattgtcatcttactggaaatcactgataaaccgccattaataaacaatactaattgaaaaataagttgtaaaacaatctcgctattagacatatttaaattgagaagaaaatctctcttagcaacgcctaaaagcgttcttttagtattgctccatctctcagtttctattttctctcttcggttaccttttacttcaatatacctgcttaaccattcagtaaaaccagaaaagtacttattataaacttctttcaattttaaactaacttcaaaaatcttaggccgtaaaaataaatatatgagactatatgcaggcaacaggatcgctattaacaataaaaaaccagacccagccataaataaatatgtaaaaatcaaaattgaagaaagggcgattgaaataatttgatttattgtttggaataaaaaagtcaacacttcagtagtatcttcagtaattctatctgctgtttgaaccgaattcatctttgtaactgctagcgtatccttcacatacagttctttcattattacatcattaacttccatgtttatttctctaaatcttaaaatctgaattttgttcataaaatatgacaacaaaagtctgataagacttaaagccgttattaatacaatactacgtacaaaagcagccctatcagccttatacactaaggaatttaacagtattccttctaagtaaacattaaaagtcaaaatgccagtactgataatattcattcctaatagaagccaatattcaattttatactttttatcaattttgctaaaaatcgtatgcatagtgtcacctaactctgactagcagtcaaaaatattaaaatataatgaatataaaattagataaactttatattcttatttatcctatgtcaatactaaataaattgatttggttttactttcatgctgtattttatattatgtagttactaactaccaaataactatctatcaactacagaaagagaaaaatatgactgaaaaagcagcaattaacatccgtgttaataaagaaactaagcaaaacgcagagaaagtattaaacaaactaggcatcccgatgtcagtcgcaattgatatgtacttacgacaaattgcattgactgacggcattccctttgatctatcttccaagaaaagaaaaaagaaaaatgatcacgaaacagcaatgatggtcgcagaagctacagctcaatatgaaatcgttaaatccaactgggaggataaattagctgagtttattcctgactggatgaacatgaataagatgactaaagaggagcttgaagcaaggttagctaagcatgcccaagatgcaagagatggtaaaagtgtcgagattagcaaaacttttagcgacctgaataaagaattaggaatttaaatttcatacaagaatatactgtcaaatcaactcctaacgtatctgtagaacttaaagagatatatagctctatcttgcaattatctcgatctccaaaaactgctcgagattatgtaaaagatcttgaacaaactatgcaagcgttaaattattttccagaaagatatagaaaaactccttcaggaaaataccgacgagttaatttcaaaaaatatgctatattctactttatcgaaaacgatactgtacacattattgatgtcatactagcttcatcaagtacagtattcaaatattaatcctttgccccattctagctattaagctatactagacagaagaaattaaacaaactaagggacaataaaatgagcgataaattaattaaaattgcatacctctacgaagatttaatgaatacttacggtgactcaggcgatgttaaaatcttgagctttttgctaaagcgtgaaggctacgacactcaagtcgacaatatttcacttggcgatgacttcaatgcctttgactatgatttcgtcttctttggcggtggtcaagactttgaacaaactgttgtcgccaaagacttaccacgtcacaaagagacattggaaaaatatatcaacgatgacaagccaatgctttgcatctgcggtgggtatcaattaatgggtagttactataagaccaactcaggtgtaacaattcctggcttagacattttgccacttcacactgtcttcaagagcgacaagcgaatgattggtgatacccgttacatgaccgaatggggcgaagttaaggcttttgaaaaccactcaggtcaaacttacttcgacaacaaggacaagttgcatcccctcggcgacatgatcgaaggctacggcaacaacccacaagaccacgtcgaaggcctgcgctatcgcaactttattggttcatactcacatggtccactacttaaaaatactaatgtagctaatgccatcatgaaaatgattatcgcttggcaccaagaacgtgttagcgaagccgaaaaagtcacagaataaaaaagacccagtcagaatctctgactgggatttttcattatcaaattaatttaaaacacgtttagcagctgagggataaaagtaggcactgatagcctgctttctcaccccttgactaggagttgcagcgtgaacatattgtccatcaccaacataaataccaacatggtaaggagctgaggcagaaccccagaacaacaagtcgcctttcttaagatgacttaatgatacgcgtttacctttagtaacttgaccataagtagttcttggtaaggtctttttagcggcttttttataaacgtattgagctaagccagagcagtcaaaggctgaaggaccggtagcaccgtaaacgtaacttttgccaacttgttctttagcaagttggactaccgcgttacgtttttctgttttgctttgactagctgcttggatagtttgtgtttgaagtggaacattaatgaatgaaattcctgtaaaaaatactgacaaaactgtggcgaacttaactaaactacgtttaaaactcaatttatttccccttaacacttcttatctttcaacgttttctatattaccgtagaaatattacagccttgttttaaaatgactactataaaattaagcaatgtaacaaaatctgctatttcttgtaaattttgcttaacttgaaaaacactataattttctatatgcttaatacattaatttaggagttttttattatggataagatagatagttatgtacgccactttttaatattaatcgcgctaattttaggactttcactcgtttcagaactgcgcgaaattattgcctatgactcatctaccattggcattatctctttaactactgccattatctgcacttttgcctcaggtattacattgcaatttcacaagcttaactggcttacgatcagtctaatcttaattctttctgcaatcgtaattctattctggttcaaaacctatacttttggtctcgttgtcagcatttttctgatttataacatcattgtatttttggtttgtgttactaatctgatttttcaaaagaagattgaatagttagatcaaatgcttaaacacaggcaatgcaatcccaattaccactaacccaccattaaacaaaaaacttaataatttcttttcaaaaaaatattttttcataaaaaagacctctctattatgaataatcaaatcttcggaccaaaattccgacaattacgtaaacaacaacatataactctagccaaagcagcaactggtataacttcaagacagtctctaggcaactgggaaaacagcaaaggtgagttagattttgaaaaagttcttttgctactaaaaaaaatcaacgtccagccaatagactttttagagagtagtataagtagttacctcaaacaaactacttcacaaatctctgcagcttatgttaacaaccaagttgataaattattgcattatgctaataagtatcttgacataagccatcgtaatcttacagacagagttagctttttacgagctgctgtggcatgcaattattacatggacctaacgagtatagatctaacaactagttctgataaactacggatcatctcccattttaataaaatcttgaatggagaagaaatctggaattttgaggatatttattttttaggaaatacacaaaatctgatgagtccacgtgacatttatagtttagcctattctttaaattattatcgtcaaaagcacaaaaacgataatagagaatggatcaatgccgtttataacactttgataaacgctgaatttgtacttataaaaacaaatattaaattggctactgatttagacttacttttaagacaaaagtgggatttaccagataattatgctttcgaaaaaattcgacaaaattttatgcatgaactgctaaaatatatttcaacccaagatgaaagtgcaataactcagcaacttcacattcttgaattagaacacctatctgatttaaaaactggttttgaaacagcatatgaacaagtaaataaaatatattttcaataaactctcctcctagttagtaatattatcttatttctaatattgttagcgctttttgccaatattttagcatttttctttttacaaatattagccatgatattttatattcgtaaactaattaagattttttgaggaggatataaagatgaaaaaatcaattaaattagttaatgtactttctgttagtgtactgactttaggacttgtagcacctgtaaccacagtttctgctgatactgctaattctgataccactgagtcaattaaaaataatgaaacaacttcaactcagtatacagtaccatctcaatttaaagaaatagataaatatgtaactgttaaagataatcagtacgtactcagtcttccacagaattcaaacattaatacacaagctaaaaaaaatgcagagagtcaattaaatattgccaatcaagtggtcaaaaatcaaaatttagtaattgatccacaaactaaatttgcagatccaatatctcttgatactaattctccatttatagcacttgctaagcgacctgcaaatgaaaatagaacatatccttggggcgttagatccatctttagaagcaatgctgctgtaagaacacgtgtaaatatatataacaatatttacattggtgccttagctgtcggagatgtgtcagggacagcaggtatggttggtttcccttgggcttctttaattggaactttaggcagcgctgccgtatcggatagatgtcaaacttgggccaatagactacaaagttataataactctcatagaaaaagtaaaatttatcaagatataaactgggcacttcaagattcagaaggtgtatggcatgactagcatcattgtgtttatcgctgttacaattatggcgatattcaccgcgattagcatctataaaattatcaatgcacgcgtaacctataaaaaatattatccctatcgaaaattagttactgtaactctgattagtcttccgtggatattcctagtttttccatttactctagattggagtacctatatcactttagtaatagtcagaattccatatacaatcatctggagtttgttaactgcggtaggattgtatattgatattaagatgcaaaataaatatcgacatcacaggaataacaatggacactaaaattttaacagcaatcatcttaattatcgtagtaattgtactagcctactcaccgttttatcaaagatatcaactattttacttgaataaagtaggctattgggatatcctaatccaattcctagtaattgcaggtatcaacttattcattggattaaaatacggtctaggtgccctgtttctattaattgttcctattccactagacattattttcttaatttcaatgatttattcctactttagaattagaaaattaaaacgcaaataactcaacaaaacggagccaactaaagctccgttttttgcttgatcttatttttcttctgtttcggcgttagattcaaagccatcgcagccacgacaaccaacactgatccgacccaatccatcggcatcattactaacccaaagaaaaggacagaaccaactgtagctgaaaatggctcaaaagcatctaataaacttacagttgatgggattacataccgcagcgcgtttgccataatttgaaacggaataatcgtcccaattacaataactgccgcagtatacagccaaacttcaggcttattcggaactgcatgaaattgcggatcaattatcaacaaactgattccagcaaaaatcatcccccaacctgttacaaccatactagaaacttttttaacaatgttaactggaatcaaagtataagcagcctcaccaaaagcggataaaatgccccaaaatagtgcaactggcgtaatggccaaatgattaaattgcccatgcgttgacaataaaaacactcctaaaaaagcacataacgccgctatgatatccaatctacgcataacttgcttgtgcgtgatagctaaatatcccaatacaaaaaatggcccaataaattgcaagattgtcgcaatagaagcattagccacttgaatacacataaaataaaatagctgcactggcaataatccaaatatgccataggctataataaccaaaacattgtgcttatttttcaacgtagctattggtttttgctttaaaaatcctgaggcaattaataaaactgctcctgaaataatcaacctgacttgggttaaccacattggtgttaatttaggactaatatcaaacaatcctttagcgaataatcctgacacaccccacattacagctgccattgccgctagaaatgtccacaatcttcgtgtttttgctggtaccatctagttcacctttttctttctcattcacctaataattaaaccacaaaaataaggatacctactgggcatcctcaactttattgatgagtttttttaactttctttttcttaggtgaaatattcaaggccatagctgccagcacaactaaaatcgaaccaatccagtccattggggtcatcaccaaaccaaagcaaataactgaaccaacggttgcagaaaaaggctcaaaagcatctagcaaacttgccgttgatgccttgataaagcgcagcgaattagtcattaattggaatggaatcagggttccaatcacaatcactgccaccacatctagccatacatgtggcgtattcggaatatgcggcatctgtgggtgcacaatcattaggcaaattcccgctgacagcaatccccaacctgtaacgactaaactagaaactcgcttcaacacactgattggaattaatgtattggtcgcaactccaacagctgaaagcaaaccccagaatagaacgctaggcgttaaagcaaagtgattaaaacgcccatgtgtcgccagcaatactacgccaataaaggcacagatggcagcaagcacatctattcgccgcattacttgcttatgcgttacagctaggtagcccattacaaaaaagggaccaacaaattgtaaaatcgtggcaatcgaagcattagcttgttgtactacaataaagtaaaacaattggactggtaataaaccaaaaatcccatatgcgataatcgtccacgcgtcatgcttatttttcattgtagcgattggcttttgctttaatacgccagctacaattaacaaaataatgcctgaagttaccattctaatctgtgatagccacattggtgtaatctcaggactagtattaaataaactcttagcaaatagacctgatattccccacattatgcaagctaatccagctaaaaaggcccacaggcgccgttgtttttgtgtaaccattctttttaatccccaacttttctaaaactaacatactctatcataacaaaaacgggctagcttgaactagtccgttaattttttattcatcatttttcttaattgggtttctgctaggcattagctgcatgaatgtagcaacaataattaaaaagccaccaaacatgtccattgggccaaagtccgcatgaagcagtgaaactgacaggatcgttgcaatcagtggatcgaaggctccaagcatccctaccgtacttggttcaatatactgcacactagataagtacattgtataagctaacaatgttccaccaataataatataaacaattacccaaacatcaactggtgcaagttttggcattggttgagtgaagtaaattggtaaaaaggcaatgcctgcaaccaacattgctgcgccgattactggaatcggcccatactttttgaataatttcccaggtaatactgtattaatcgcttcagaaaaagccgcaattaagccccagaaacaagcaagcggtgataaagcaagttgatcgaatctgccacctgtagccaagatgaaggttcatacaactgctaccacaattgaaatcgcatcaattcttcgtggccacatcttacttctcaatgaagaatatataattatgaaaactggcgctaaaaattaaatcaccgtcgctgtcggagcattgctgtacttgactgctacaaagtacgataattgtgagctccccattcctaagaaagtaaaaatgatcaacataatgattacttttttatcatgtagcattgccttgacttggtccaagtatttccaacaagcataaatcataagcagggcgcctgaaaaaagcaaacgcagacctacaagccaagcagtatttacattagtgctagaaaataaaaattcaaccgccgtacccgatgcaccccaaaaacaggcaccgacaacagctaaagtcaatcctttataacgctaattcacattcacacatcctttagattaatgtttttcattgtaacatgggctaaaggaaaagttcaatgcttctaaagttgatttaatctatataacgtataacctgacacgctagccaataagccgattgtaaaaagcaaccaagattctggatgaaaggcaattaaaacaagtgaaagaaagcctgctgctaaactagaattgcgttccattcgctttttgccaaaaagcagaccacacataatgccaaacatagttagcacataaaatgagtcaactaacagtaacaaattctcaataattgctagatcacttggctttacttttacactcaaatcagtaaaaatctgagcacagccaaaaaataccatcacaaatgcagctaagatcgtgataaagctaatcgtacgaaaaactgacttcaccttttgagttggcgtttcatcgataaaggtttttaagaaaaactcgtgatctttttttgctactacagctctgcccatcttcttgtcataccagttcaatagaccagaaccaattagcataatagcaatcacagcaaactggatgacaattaaacgcatgaaaattggaaaggcatagattaccgtcaataacaaaattactacatagatcagctatgcataaagaaagaaatgcagacgctgtttatttttgaaaatagtttggaatgtttttgaattaggatcttgcataagacttctccccactaaatcttattacgaaaactcaaccagaaatttgccccactgagaatcaagccaataacagaagctacttgcatgcttggctgcatgaaaagcaagatcagtgataaaacaacagttaaaacgctagacgcacgaattaatttacgattcccacctaaaataccgacctccacacaaaagagtagaacaacatataggccatcaccaatcagccaaacattttcaaagagattggcaaaattaccggtaagcggcttagccaaaatgtcagtccaaagctgacgtgcaaaagcaatacttaaaccgatatttgcccaaaagagcaagaattcaaataagtgaagaaatacgtttttagtaaatctaatactagtcagtgtttcccagaatgtatcgtgttttttaatcactatccttcgatcaagaaaggcaccaattgaatagtaaatcagaattgcaatcccttgaaatgcaatcaaatgcataaaaactttaaagtcaaacatcaatgtgaatagtaaaactactacataagctaactcaaaatataatacacagcgactaaactttcgctcgctaagccagtgcttcaattctcttttattcatatgatcactaatattgccattcatattctcaccatcttttaataattatctaattatgcaaaaattgtataatgatttcaaaattttgtctagtccttttataattgatttagtaaatatttttcgaggtaaattatgaattatcccattttaattgctattttgatcttcttgctgtgctttggccgattcatttggatcattactcacgaacgtcgttccttacgcgctggagttagcttagttatcaccttatttagttttttttttaggtgtagtcattctggttaatatcgctgaccttgatccacattacaaagactggattttgccattatttgtgattgcgctatttgctgtgatggctggaacgattatctttgcattaactttgatcattatgtttttctacgatggcattaaaatcattatcaaagaaggaaaccgctggacaaattatctttctctgggcatggggatttccattatcttcttcctatttttatatcctcttgtgggacgaattagtcatgatagctggttaaagtatccctatatttttctatggctagtcatcatctacttagtcactatcatgatgatgtatactttaacttcttggattaatttaattaattggcacatgccgcacttagactacatcgtagtgttaggcgctggcattatgggaacaaaggtaacaccacttctggcagctagaatttcccggggaatagaaatttatcacaaaaatcctggctctaagttaatcatgtctggtggccaaggacctggtgaagacattcctgaagcagctgctatggctgaatatgctgaaaaactgggtattaataaaaacgatattattatcgaaaataaatccaaaactacccagcagaacttgcaattctcacatgcactgatgaaaccaaatagtcgcttctgtattgtaaccagctcctaccacgtgtatcgcgctctggttttagctaaacgtcaaggactcaagtgtactggttatggtgccaaaactaagtggtattttactttaaatgcttttgtgcgtgaattcattgcatatctggtaattactaagaaaatgcaattgactatcatcggttttctagcagctatcatgattgctgctgtcgcatttcatttttaatttattgcgttaagttgagaaacttagcgttttttattgatttatcttttaatttttttataattatagtcaaatctatagaaagcaaggtgtaactatgaggattcgtaaaaacaacttgtcaaactgtcattagtcaggatgacgagtcctgactttttcaaaaaagcaggttacttatgtcagaaacaaaattcaataaaactcttcttagtgtcagtcatgtggatttttcctaccctaagcgcaatttattcaccgatctaaatttttctattgctaatggtgaacgtgttgctctagttgggcctaatggaattggtaaatctacactaattgacctaattcgtaagcaaatccaaccagatgatggacagattatttgtcacggtgaaattaattatgtacctcaagtcaatgatcaaactgtaattaatgactcaaagagcgctggtgaaaagcgattagctttaattgaaaatactatttggcttcctggttctcttctcttattggacgagccaacagtttacttagatgacacaaatatccagaatttactctacttactcaagaattatgatggagcaattctagtagctagccatgatctggattttatcaaccaactatgtgagagaactattattctgcagccaaataatgcagtttattacccaggaaattacgcacagtatctcgaacaaaaacaattagataaacaagccgtacacaattttaacgaaaagcgagatatattaaagcaacaaattactgaaaaagtctctactttaaagcaaaaaagtactgactataatcattttgctaaaacacaagacaatactggtcactatccttcacggagccatgatcatgtccaaaaaggattaaatagtcggcttaagcgagctgaacgtgaactggctgagcttccagagaaacagcatctatatcaacatcaacttaaacttcctgaatttaaaaagtggccgactaaaatacataattactctatcaaaatagatcaattactcagtccccaaaataagactttattatctaatacacagttaaacttgcaaacagccgatattattggattaatcggccccaacggctgcggtaaaacaacattgctcaaatatttagaacactacattaatcagcagcaatctttgccaccagccagctacattggtttaaatacgactaaacaaaagaaacctgccacagtagcagatttctttcacgagactattttgagcaaaactgaagttaagcgtcttttagttaaaatggatatgtttgtcgatttgactacaagactcacggatttgagtggtggcgaatttgctaaattagcattaatcaagcagctataccttgaacaagaatctattctattacttgatgagccgactaactatcttgatccagaaagtgtgacggccttggcccaaatgctaaaacagtcgcatctcacttgtattattgcatcccacaattgcaaatttttaacccaattttgccaacaaatctataaaattaagcagcaaagactaattgaattgcactaaagcatttctcttaaacacatatttgctaagcatatcctttactatccccatctatattaatgaagatcacatttggtgctgcagaagtttggtgcgtttctttattatatttaccaccataatactcataacgaggtttccccttgccaaaaggatctattcggcaaagaaagatcacatatgtcgctttgaattctttttccggagagccacctagcccgccatagattatttcttcctgataagcgttggcaacttccagaatgttttctcctggttcttgcgaccctacttgaattattaacccgtatttattgcgcttcttgtctcgcgcaattacatgtacgattgctttttcatctaagacatttctatttggatcatcaagtgattttgcttcctgaatatcgagttcgggaagcattctttgtactgctggaagaagctgctcattatacttcttcataattcctgcagccaagtgatccaccattgccggtgacatttcattttctaacataaaaaaatcctcatttctaaaaatctgagagttttatccctctattacttattacgcaaaaaaacgcaaaaattttttcagaaaatgaagatttttcaattttttagttttcttttctaaaaaatggactgagtagcgatacaagcaggccgtaaataaaataccagcgataaatatctgccaagtcttgattttgaatccacaaaattattgcaattactgtcagtaagccacctaaaaagattgttgaacccatatttttatcagtaaagaagctgatagcagcacctaaggtaattaacgctaccaaactataaatgacgataatcactggtcctttagtctgaacgttaacatcaagcattggtgcgttagtaaacagctgccacacgataaaaccagctaatgcaatgccacatagcaatactagtaatctaaaaacaaaagttaaagtctttttcattatttttctcctgtatgcataataatactagtataacagcaatatcgcggcatacgaaaagcgcttggatttttccaaacgcttttttactattcttttgcttgcataaattgttttctagtgatgtatttgattgatttaacgtattgccccttgtgttgaattgaaatatattggcctgatggatcgtagccgccaacctttttcaacaataaattctttttcgtcttaggattatacgccttcacattgtaataccgctgtgtgcctttatctacttgagcatagcttgtttcctgggaaatgaatggattcaatctatcagtaaaagagttatgaaatgaaaaaatgcagattactcccactactagcactagtgccgttacaaatgcggttttaatagtacttttattcataatattcaccttcatcgttcaactattgttatactaaaatagtacactcattcaatgaatttagcaattgttttcatgaaaaaaacgcttgaaaaattccaagcgtctttcacctaagccaaaaatctttttatagcttcttctacactagcattcaatgattggtgcttcgttgcagcataattagccaatttttcatgtaatgaaggatcaatgcgcacattaaaattacctttaaaaggtttctctggtataactccatcttccttacagctcattagataatcatcaatggctccttgaaaatccttctccaattcatctattgtattaccttcgtaagaaataagactcttaatcccctgaaccttaccaaaaagaatcttatcctccaaagtatattcaattgaaccttcataacccttatacttcatatattgattagtttttttcatctttattcatctctttgattttatcttgaatttgtttgatttgatatggtaatagttcttttctaggatgtggtttatgaagaatgagactgtaaaatagtttgtgtaaggatgaatgattccttaaatttatttctttaaacattagaaaaaggagttcctttctcgtatgattggtttgaacaaaaaaacacatacagaaagaagaactccttcatgaatgattttaccaaagattttgctcaagctctattcaatccagacaaaataaatgatttattgcgcaaagagctacaacaggctgttaataacttgttagaagctgaattgaccgcctttctgggctatgatccctatgccagaaatggctggaatactggcaactctagaaatggtgcttatttccgcaaagttgatacgcaatttggcccaattgaagtgcaagtgcctcgggatcgcaacggtcaatttcatcagcacacgctgcctggctacaagcagcactcggatatcttggaaagcatgattatcaagctttactccaagggcgtgaccaccagggaaatagccgatctaattgaaaagatgtatggcagccattacagtccagctcaggtatcaaatatttccaagcagatgattccaaaggttgaggcttaccacaaacgcaagctaagcgacaagtttttctgcgtctatttggatgcgacataccttcctttgcgccgagaaacatttgagcgtgaagcagtctatattgccattggcatcaagcctaatgggcacaaggaggtcattgactactgcattgcgcctagcgagaacattgaagtctggacagatatgcttcaaaacatgaaatcccgaggcttaaagcaagttgagctttttctttctgatggtgttgttggcatgaaaacagccttggccaggacttatcctaaagctcattttcaacgctgtttggttcatgtcatgcgcaatatctgcgctaaagtacgcgtcgacgatcgtgaaaagatcatgaacgaattcaaacaggtgcatcaacagacaaacaaagaagaagccacagctgtcctgcatgacttctataccaaatggggcaaggtttacagccatgttatcagaagcttgaaagacatagaaccagatctgctggtcttttataactatcccaagcagatcagagcttcaatttattcgactaacatgattgaatcatttaacaatgtgatcaagcgcaaagctaagcctaaggcagagtttccaactgaacagtcgcttgatgcttttattggcattcaggcaatgagctacaatgaccgttatttcaatcgaattcataaaggctttggtcaggttcaggacaccttagaatcctactttgattaaataaataattaaaaaatcaatttacgagaaagatctatttacacaaaagatttgacagtttctgaagaatgatccgatcactgccctttttaaaaataattctagatccactcgtttttcctttattatcgagttgataatctagttcatgcaatagtgttttagcatctttaaagtcaaacgttcttggatgactatataactttattaatagcttttctaatttacccacgttatcctcacttaagtatataatataatatatcatttgtaactaaatttgcaactaagacaaattatacctaattcgctaaattcacgctactaaaaaagcgcttggaaaattccaaacgcttcttttgtttaatcatctagacctaacttcttaaagatatcatcaacatgacgcaaatgatagtgataatcaaatgcatcatcaatatcttccttggataggtaattcataatttcactgttttcaaccaatggcttaaactgcttttgctcattccatgatttagcagttagcttctgtaccatatcataagctttttcacgagatagacctgcttcatcgatcaacttaagcaacactcgttgagagtaaattaatccatatgtacgatccatattcttaagcatcgtttcagggaatacatctaagttagtcaaaattcgattgaagcggtgcaacatatagtcgacgccaatagtcgtatcaggcaagataactcgttcggcacttgaatgagaaatatcacgttcatgccataacgctacatcctcgtatgctgtaacgacatgtccacgcattactcgagccattccacagaggttttcagatccgatcgggttacgtttgtgtggcattgcagatgatcccttttggccagcgcggaaatgttcctcaacttcatgaatttcactgcgctgcaagccacgaatttctgtcgcccaattttcaatactagtagcaatcaatgctaatgtcgcaatgtattctgcatgcaaatcacgaggcaatacttgactagtaattggctgttgtgtcaaacctaattgcttcattacgctagtttcaactgcaggtggaacattagcaaaagtaccaacagcacccgaaattttgccagattcaacgccttttgcggcatgttcaaatcgttcaatatcacgattaatttctgcgtaccagcgagcaatcttgagaccaaatgtagttggttcagcctgaacgccatgtgtacgtcccatttctactgtgtacttatactttttagccttttctgcaatagttgcttttaattcgtgcagatcttttctgataatctcatcagcttgtttaagtaagtagccttgagcagtatcaaccacatcagttgaagtcaaaccaaagtgcacccattttttctcagggccaaggctttcagacacagttctagtaaaagcaaccacgtcatggtgggttacttgctcaagctcagccacacgctctgcagtaaagcttgcattcttagcaatcttctccgcatctgcttctggcacttcaccgagttctgcccaagcctttgttgcggcaatttctacttcaagccaagctgcatatttattttcgtctgtccaaattttccccatttctgggcgagtataacgttcaagcataaattacatttcccatggattcttcaaaacaatagtttgttcacgatctggaccaactgaaacagttaccaaaggaacgccaaccaactctgaaacgcggttcaagaatttcttagcattttctggaagagcgtcccaagtcttaacttgagtaatatcttcatcccaagctggaagttcttcatatacaggcttacatctgtataattccttcaaacttgctggataataatcaatcttttcaccatcaagttcatatgcagtacaaatcttgatcttgtcaaagcctgaaaatacatcaagcaagttcaagctaaggccattgataccagcaacacgctttgagtgacgcaatgcaacggagtcaaaccaaccaacacgacgtggacgaccagtaacagtaccatattcatgagcagtttcacgaatacggtcaccaacttcatcaagcaattcggttgggaaaggaccggcaccaacacgagtagtgtaagccttgcagacaccaattacagtatcaagacgattagcacctataccaatacctgaacaaataccaccagaaatagtattagatgaggttacaaatggataagtaccttcatcaatatcaagcatcacaccttgcgcaccttcaaataaaactttcttattttggtcaagtgcatcattcactaagacagaagtatcagttacatacttcttcattctttgaccatattcatagtatttatcaaaaatgtcttcaaatttaagtgctggcttaccataaaccttagtaaataattcattctttacttcaaggttagcacgcaatttttcttcaaaggtgtctttttcaagcaaatcacaaacgcggattccaattcttgaagccttgtccatgtaagttggtccaataccattcttagtagtaccaatcttgttagcccccttagcttcttcttgatattcatcttgcttaatatcataaggcataatgatgtgggcacgattagaaattctcaagccactagtatcaatgccactcttttcaagattttctaattcgccaaacattacttctggattgattacgacaccattaccaataactgtattgtccttggctgcaaaaataccagaaggaattaaacgcatcttgaaagtttgaccattaatatcaatagtatgacctgcgttgttaccaccatttgaacgaactgcaactgcagcatccttactcaaaaagtcagtaatctttcccttaccttcatcgccccattggcttcctacgactgcgactgctgtcatttaaaattcacctcataaaaatctctataaatattacgtatgctagtctagcaattaatttacaaataatcaatataaaatccgaattattttatttttaaattatttcatagttcgattttcatattgacaaacacaaattattcccatatagtatgtctcggtcaacaaacaagattaaagggagcagtttttaaatgagtaactactttagtatggaagcctttgactatgatgatatccaacttgtacctaataagggtattatcaaaagccgtcgtgatgcagataccagtgtcaaattcggaaaccgaacatttaaaataccggttgttcctgccaatatggaaagtgtcattgatgataaccttgctatttggctagcccaaaacgattattattacgtaatgcatcgttttgaacccgaaaagagaattcccttcatcaaaatgatgcatcaaaaaggattatttgcatctatttcggtcggcattaaagacagtgaatatgattttattgatgaattagtcaaggaaaaccttaaaccagaatatattactattgatgtagctcatggtcactccgtttacgtgattaagatgatcaagtatattaaggagaaattacctgattcatttttaacagcgggcaatattgctacgccagaagccgtacgtgaactcgaaaatgcaggcgccgacgcaaccaaggttggtgtgggacctggtaaagcatgtattacgaaattgaagactggctttggtactggtggttggcaattagccgcattaagaatgtgcagtaaatctgcttctaagccattaattgccgacggtgggattcgtcataacggcgatatcgctaagtcaattcgttttggcgctaccatggttatgattggttcaatgctggccggtcatgaagaatcacctggtaatgtaatcaaaattaatggtaaaacttacaagcaatactggggctcagcctctgaggttcaaaaaggtgcttacaaaaatgtagaaggtaagcaaatgttagtgccataccgtggctcaattaaggatactttaaaagaaatgaaggaagacttgcagtcatccatctcatacgctggtggtcgcgatcttaattccattaagttagtcgactacgtaatcgttaaagacaatatttttgatggtgataagtaattttaataaaatttttgcatttttattattttcctgttaagaatattacgataatatagtattatctatcttttttcgatagaataatataggtcgagttattgtagggtagtcaataactcggctttttttgattattttttaaaaacgattggacagagttttaaattgtgttatactagttgtcgttgatgaatgcgcccttagcgcaactggatagagtgtctgactacgaatcagaaggttgaaggttcaaatccttcagggcgcacttaaaaacgggaaatggctcagtttggtagagcacctggtttgggaccagggggtcgcaggttcgaatcctgttttcccgataagttagccgcacttcattgaagtgcggtttttttgtgtaaaaaaataagtattccctcggaaatacttatcatgctatgcccctttagtagctcgtctaaagataatctgtgtatctgaatctacatatttcaataacggtaaatcgtaatccttaacctgggccaaaacatttactttctcattgcatggcaaatcgcgtttagtaatctcgatttcgccttcataacgcggatacaaatgattatcaatcgtcacgctgccagttggtctagcataaatattatcttgcggctctgttgacaaaaacatcttttttctgctttcctttaagcgaactacgtcacgcgccacatctggacgattatgccaatcattgccaaacaattctggtatatcagtatctaaatgcagtgtaattgcaccctgtttttgataattagtaatcgattcaattgcatccctcgtaagttgcggatctcccacaaaaatgtgatcgcaatcataatctttcaattctaagatcgcagctaatgggttttcatatcgctgcttctccaacgttggcaatcctgcaaaaattggtccacgcaatttgccatttcctgaaataaaggctgctgttttcaaaccatattgcttaagccactcattcttcttttgcatccagtgtgcatcaagacctgtttcaggacgtgggtagaagttatgtcctgctgttaatttttcaaaatttgcattgctataacgcagatcatcaatattttgttgcgtaataatgctggcatttagaactatcggcatttctttggacaacttggcaataatatcagtagaaaatccatgatctactctaagaccagttagactcaaacttttaatttgctcaacactattgacattaatacccaaatcttgcagatcatctgccgtgacatctgcaataattttcaagtctagtttttgacaccaattagttaagtccgccagccgatttaaaatcgtctcactatcagtatcaggtacagctagctgagtaaaaacgcaggtaaatccactattgcgcatcgtcagcaaataattgtaattctcggacgtcaaatcgtgtcctagataaacagaaaatcctaacattcttattcctctaaaattaattaatttcttttattatctataacttaaacgagactgtaaaatagtttgtgtaaggatgaatgattccttaaatttatttctttaaacattagaaaaaggagttcctttctcgtatgattggtttgaacaaaaaaacacatacagaaagaagaactccttcatgaatgattttaccaaagattttgctcaagctctattcaatccagacaaaataaatgatttattgcgcaaagagctacaacaggctgttaataacttgttagaagctgaattgactgcctttctgggctatgatccctatgccagaaatggctggaatactggcaactctagaaatggtgcttatttccgcaaagttgatacgcaatttggcccaattgaagtgcaagtgcctcgggatcgcaacggtcaatttcatcagcacacgctgcctggctacaagcagcactcggatatcttggaaagcatgattatcaagctttactccaagggcgtgaccaccagggaaatagccgatctaattgaaaagatgtatggcagccattacagtccagctcaggtatcaaatatttccaagcagatgattccaaaggttgaggcttaccacaaacgcaagctaagcgacaagtttttctgcgtctatttggatgcgacataccttcctttgcgccgagaaacatttgagcgtgaagcagtctatattgccattggcatcaagcctaatgggcacaaggaggtcattgactactgcattgcacctagcgagaacattgaagtctggacagatatgcttcaaaacatgaaatcccgaggcttaaagcaagttgagctttttctttctgatggtgttgttggcatgaaaacagccttggccaggacttatcctaaagctcattttcaacgctgtttggttcatgtcatgcgcaatatctgcgctaaagtacgcgtcgacgatcgtgaaaagatcatgaacgaattcaaacaggtgcatcaacagacaaacaaagaagaagccacagctgtcctgcatgacttctataccaaatggggcaaggtttacagccatgttatcagaagcttgaaagacatagaaccagatctgctggtcttttataactatcccaagcagatcagagcttcaatttattcgactaacatgattgaatcatttaacaatgtgatcaagcgcaaagctaagcctaaggcagagtttccaactgaacagtcgcttgatgcttttattggcattcaggcaatgagctacaatgaccgttatttcaatcgaattcataaaggctttggtcaggttcaggacaccttagaatcctactttgattaaataaataattaaaaaatcaatttacgagaaagatctatttacacaaaagatttgacagtttcacttaaacgctttcctaaatatcttactacattttttgcttgcttttttctaaaaaataatgttaaatacatataaacaaattaaaaagcgatgaaaaagacgagtaaataatctaattctttccagtgaattagtgctagtgtgaaactaatagaccctggattattgaaaaacacttttagcagctcactgaaacaacaattcttagagtaggttgagacgtctccggtacgttaccacgccggtggagcatgatagtgcttcatgagtcggtctattaaaatatagacaatgtgggtggtaccgcggaaaaaagcctttcgtccctgtttttttagggagcgaagggctttttctttgctctaagtacattagaaagaggacttatattatgacacttattttacctaaagattatcacccaacattaactgtgcgcgacactgaagctgcgattgtatttattcgtgaaaccttccaagataaattggcagaaattctcggtttacaaagaatgtccgctccaatgtttgtcgaaaaaaagaccggcttaaacgacaacttaaatggtgttgagcgtcctgttgcctttgacatgaaggcaatgcctaaagaagatactatcgaagtagttcactcattggctaaatggaagagattggctttgaaacgctatggtttcggaatgcatgaaggactttacaccaacatgaacgccatccgccgggacgaagatcttgataacttccactccatctatgttgaccaatgggactgggaaaagattattagtaaacaagaacgcaacaccgacacacttgaagttactgtgatgaacatttttaaggcaattaaggcaactgaaaagctggttgctgcacgctacccaggctctacttatcgcctagctgatcacgtttcatttattactactcaagaattagaagatcgctggcctgatctttctccagaagagcgtgaagataagattgctaaagaagaaaaagccgtctttattatgaaaattggtgacaagttaaagcgtagtggtgaaccacacgatggccgtgcaccagactacgatgattggcaattaaacggtgacttagtcttctggtatgaaccgcttaacagtaagattgaaatctcttcaatggggatccgtgttagcgaagaaagtttgcgtgaacaattgaaaaaagctcactgtgaagaacgtgagaaattaccattccaccaaatgcttttgaagggtgaattaccttattcaatcggcggcggaatcggtcaatctcgtctctgtatgttgctgttaggtaaggctcacattggtgaagtacaagcttctatttggccagaagatatggttgaggcttgtgaagctgacgatattaagttgctgtaattttaagatttttttacataccaaaaaagatcctgcaaaatgatacaatcccactaaagtggacgattgaaatacataaagtattcaattatccatggaggtgggattttttatgtccagaaaaagtaaatattcattcgatcaaaagatatgggcagttgaacaatacttgaatggtaataggagcagcgttgaaatagctaaacggcttaagatgccaagtaaaagtggagcgatgcaagtaagaagatgggttcatcaatatcaaagcaatcgtgatacccttctaagtaatgctcaatacaataatcattactctaaggcatttaaagaaaaggttgttcaagaatatttagctggcaaaatgtcgttaccttctttagctaataaatatggcattagaagcaatggaacagtatcagaatgggtttccaagtataatagtcatatagaaaatcgggactatgatccccatccggaggtctatatgactaaagcaagaagaaaaactacccagcaagaaagaattcagattgttcaatactgtcttaatcacgacaagaattacactcaaacagctgtcaaatttgattgttcttaccagcaggtttacagctggacacacaaatatctagctaatggtgaaacaggattaacagataaacgaggcagacataagaagccagaagagctaactgagttagaactggctaatcgaaaaattaaggaattagagcgtcagctcaaagaagaacaaactaagaacgaattcctaaaaaaattagatcagttagaaaggatgtgcttgccggacaaccaagatacagacaagccgcaataaaaagacgctggaaacaagaaacatatcagttaatccatgactgccatcaaaagtacaattggaagattgatttaatgtgcaaatgggctaaaatagcacgctcagcttattacaaatactttgatcctaagcgcaagccgagtaagcgtgaagaacgagacaaaaagattgaagcaaagatcattgaaataacccagtctaacaacagtctgtttgggacggaaaagatgactatggcagttaatcgacagatgtctgatgaaaagccggtttatcataaaactgtttaccgcttgatgtgtatcaatggcattagatcacaaaagcctagataccagaagctaaagttcaagcatacaacgcctgagaaaacggccgaaaacaagttaaaaagagactttaatgcatctagacctaatgaaaaatggtgtacagatatcactgaagtcgttgctgctaacctgcctaaggcatatctatgtactgtgtttgatctatatgatcgctatcctgttggctacgcaattagtaaacgaaacgatactgctttagttcaagcagcctataagcaggctgttaaagcataccctaatgctcatccgcttttccatagtgatcgtggttttcaatttactcgcgcacctttccaaaaccaattagaagaccaaggcatgacgcaatcaatgtctcgtgttggctgctgtattgataatggtccaatggaaggctggcaaggcattatcaaagaaatgcgagttattcttcatcctcaagtggccagttatgatgaacttaatgattctatttgtaagacaatagattactacattaatgaagatccacagaaacgttttaacggtttaactgctggtgaaatgcgcaaagaagcgatgaaaggcaatattaagaattgccctattgcaccaaatcatcgaattgagaaatactggcaaaaaatacacgaaaagaaaataagagaagccaaaaaatcctcagctgattattaatcaactgaggaataaaagctttatgtaattctactgtctacttgacagggaatgtatcaaaatgtaggatcttttttctattgattttatttccgttctcttctagaaatccaagccataatcaatggcaacaatacaaagccaaagaccatcatcgcaatggcataccagttaacaccgataacttgccctgctgcgtttactacaccaaattgtgccttccagttatattcaactaacaagaagatcacaatcacaacagataaaattggcacaataacatcagtcataacgctcttattagcctttaagatatcttcttttgccttaccacggtaaaattgaataactgctagaggtaccacgatgaaacctaagaatctaaccatcgcgctcaaagtaatcaagttgaccatattgtattcaaaggccatcggaatcaaaattgccaagccaacagagataaagaaagttctaattgggaagttattcttagttctcttagttaaagcttgtgacatctgaccctcacgagccatagcttccagaatacgtggagcattaaagctggaagctacgttgatcccaaacattgaaaccaaggcaccaaccaagattacatcacgtaagatttcattattaaaaatagccgcaatcgctacaacttgcttagttgtcattaaagcacgtggattaagtaccatcgctaccgctacaacgccgatatagacaaccgcaataattaagattgccaatggaattgctcgtggcaagttcttttcagggttcttcatatcttctgaaccagaagctactgattcaaagccggtaaaggcatagaaggctgaaacaattgacatgacaaaggtagttgtagttaaagttggcacaattttctgaccattctgagtcaattgatctacttgccctaggttgcttgatgcaccagtagtaattaacaaaactactccagcaataataattaataccaatgcagccaacttaccgatagtagctaaattcattacatacttaactactttttgaccaaacaagttgatcacggtaataattgccatcaagatcaaaaagccaattgtgacatttattgccttattgggatttccgccaaaaattgaaatagttgacttaattaccccaacagccattacgccccaagctacactggctgagaagtaacgcagaactcccatataaaagccaatttttttaccaaaagcggccttggaataagcataggcagcaccagatttagtgacatactttgaagctgccgcaaacgaaatggccagaatcgctgcaaaaattgccgcaattaaatatacaactaaagctttactaccggcttgctgtaccacactaccaggtgttaaaaaaatacctgaaccaataatggcattaatcgctaacagcacaattgaccaaaagcctaatttatctcctgttttttcagtcatctatttgcttccttactttgcattatcaacaacaaacttaaataagttattcataaacgctacatcggaattacggtgcaacatttcagggtgccactgcacggcaatgacattaccttgtttattttctagcccttcaaccacaccatcaggagctgttgccactgcttttaaatctggtgcaacgtctttaattaattgatggtggaaagaattaacgcgaaattcagttttgcccaaaatttcagccaatttactatcagcttccacttccatactatgagtaggcaaagttggcgtatgaccttgcatgtgtttcaaagtaagttcttttctgtatgaaagatcttggtaaagcgtaccgccatgagccacattaataatttgagcaccacgacaaatgccaagtaccggaataccattttcttctgctaactttaacaagcgcatatcaaaatgatcgcgttcaggccaagtatcaccaatcttttgcattggctcctcaccataaaaacgtggatcaacatcatgcccaccagataagatcaagccttgaacatgattaagctgttcacgaatcacctcatcattttcagtaaatggaataatgtaaggcacaccgccattttgaactactgaatctacatagtcttcgttcacataactacgatggtatcctgggaaaattcctccatcgtcaataattacagaacctgagataccgataattggttttgtcatttatgctcctccttctgcttactttttgtatgtaatattatagagaaatttatgcaaaaagtacaattaaaaatactgattgtagctttaattttgattattctgctttttataatccttgttcaaatcgatgttgttgcaaaacatattctttgaaaaacggaagcgtaaatgcaacttcaccatagttagttgacttaataatctgatcgtctaacaagcgtctacgataattagctacaaaattgcttgggcggtttaatcgttcacgaatttctttgatcgaaacacgttgttctgaactctgggccattgctaaaacaaattttttatcttgttttgatagactactaaaaatcttcgtatatgcgttttgatctaattcaactagatattctggcttaattttatctagcagattttgatcgattattttatttttttttgcactattccaaaccaaatagcccaataattgaaaggcatacgaatagcccattgtcattagcgccattttgctaagaatatcttctgttacctgaaatcctgattgtttaaatacattgttataactaacttcgatttgagctaagtttaaagcagataaagctattctttttccgcgcaataaaaaagtcattatatcttcattttgtaactcagatatattttcaggaagccctgtcatcattaaggccacaggataatcttttcgatttaataattgataataacctgcaaaatcttttaattcacgattagacttcacttcgtctaaagtaattaaaaccttaatccccttttttcttaacttatcgaacatatttgtcaaaataccttgataagtagaaaaagtaggctgacttatctctgcagaaagctgtaaaccaaaggcagaaaaatttaagcctttaatagattcaaagattttttgtaattcatttccagctttcatatacaaactatcaactaaagctgccattaaatttgatcccatagccaaatcaacaacgatccagtcaggattcttttcaactcttttgccaatctcagtcaaaaatgtagttttgccgactccacgcatcccgtaaacaatcgaaatcttatacggactatttggattatttatttcattaaccacatcatcaatcaattgacctcgatgcaaaaaaacagcgggaattctaccaaaactaggattaaatggattgttcattttatcacctcatcaattactctatcttttatgtttattatattatttttgtgtatctttgtgtatctctatgtatcttgaattcatttgtgtatctttatgtatctctatgtatcttactgcaataaaaaagcagcaggcctctcgcctactgctcaattttatttatcttttcgatgcttaactacataaaccaatactgctacaattaacactgctgcaccaactgctactgaaatttgcgtctccggattgataaacatgaagacaacaattactaccagcataatcaaagcaaagtaatttgaatacggataaagcggcaatttaaacgggtgattctccatcaagtgtggattctttcgtctaaaacgcaactctgctagtaaaatcacaaaccatgcaaccatccctggcaaaacagatgaactatagacaataacaaaaacattagctagtgatttattcaaaaattgtgccaaaacattaagcatgaaaccaataaagatcccactagtaattccaatgatcgcatgactaggcacgattctcttagatacgtaaccaaaagtcttaggtgcttcaccttcgtgtgccaatttatacaacattcgacttgatgaataaattcctgagtttgcaccggacaaagctgcagtcaaaactacaaagttaattactgaagctgccgcggtaattcccaccttggcaaaggtcgttacaaacggtgagccaatgctatctaatttattccatggataaattgtgacaatcacaaaaattgccccaacataaaagatcaaaatccgccacaatactgacttcacgcttttaacaatggccttatgcggatcagatacttcaccagctgaaatcccaattagctcaattccttcataagaaccaacaataatggccattgagaaaaagaagcccttgagaccaccagtgaagaagccgccatgactccacaggttagaaaagcctactggatgaccgccattaccaaagccaaatagaattaccgcaaagccaagcaaaatcattaagataatcgttacaaccttgatcatggcaaaccagaattccaaggttgcataagctttcgcactagctaagttagccaccagcaaaaataaaataataattacgccggcaacccaatcagaggtgcctttccaccaaaagcgcaaatactctgttgttgccaccacctcagaaattccgacaacaatgtattgaaacacgtttgcccattcggctaaatagccggcaattggatgcacatgctctgaagcatagtctgcaaaagaaccagtacctggatcaacataaagcatctcacctaatgcccgcattacgatatacaaaataaccccaacaaaaatataagctagcagtactgaaggaccggtccacttaatggttgagctagcccccatgaatagtccaacaccaattgctcctccaagtgagatcatttccatctgtccggctgtcatcgaccgctttaattcaggtgctttcttcgccatttccaactccctttctttagcatctgtaaaaatttcctaggaaatatatctattctcatttatctttaatcactataccttatcattttttcgaacaaaactgtagctgatcgctaaaaagattgcaaataaaatcgaaataatcaaagccagctgcgttgatttgataaagaataataagattaaaataccaatgtaaaaggcaagcgtaagccagctagttactgggtagcccggcattttaaagctgcctaaattctgcttattctgtttgcgataaacaatatgtgctgccataatcatgatccaaacaatcacaaaacaaatcgttgaaacagttgagacaacggagaatatttctgctggcattaaatagtttaaggcaactactacaaataaaattaatgaagaggtcatcgaagcgttcattggaattgcttttttggtcaattcacctagtcttttaggtgcatggccgttacgtgctaatgaataaagtgatcgactagttgaaaagattgcactattagtcgctgacatagctgcagtcaaaacgacaaaatttaaaatccctgcagccgctgtaacaccgatgccggtaaagacctggacaaagggacttgaagtagttgtaatgtgattccatggataaacagacataattgccaacattgagcccacataaaaaaggccgattctaactggcaaagtgttaattgccttaggaatatccttttgcggattagctgtttcactagcagtttgacctacaatttctaccccaacaaaggcaaaaacaaccatttgaaatgataaaagaaagccccaaatcccagttgggaaaaagccaccatgattaactaaattagttagtgaaacataaccgccctttacatgcgtatgaagtaacaacattacagcaccggtaatgattaagactacaattgccattaccttaatcattgagaaccaactttccagttcaccaaataatccgacatttaccatgttaatcaacatcaataagatcacaattactaaagggccaacccattgcggtagccacggaaaccagtatcttaaataaattcctgtcgcagtcaaatcagccatagctaaactaagccagcaagcccagtacatccagcccgctacaaattcggcacgcttacctaaatattttttgattgattctaaaaatgaatgactttcaggatcggctaagatgagctcccctaatgcgcgcatcataaaaaaggtgataatccctacaattaagtacgacaaaataattgaagggccagcactatgaatggctgaaccagaacctaagaataggccagtaccaatggctcctcctattgcaatcattgttacatgacgacttttaagcccgcgttttaatctcggcttctcatccataattacttcacaccttcctcaaaataaaaaatggagcggcatgttttttaaatgaaacatgttgctccatcaagtttgctttttttgaattatatagtcttatgccaattcatgcaattattttttatctaaaaaagatattcccttaggaatatcttcattattagtaaactttaaattggttcaacggccagtaacgtactttaactacgccaacgatactactacgcttaatggttccgatataacggctatccttagaaacgctccggtgatcacccattacgaaatatgttcctttcggaatgcgcccagtatcctgcacatatttaatctgcgctctagtaaagtattgctggtaagtccgcgcccgcatcagtgactgcatagtaaaattctgagtctcagaataaaatgtatctgagccattatcaattaacttcgttccttgtttcaaccaaggttgagcaatctttttattattaatgtagatttgattatttttgctgacgattttttcaccaggcaaaccaataacacgcttaatgtacaaagcacctggttcatctggtgctttaacaatcactacttcaccacgcttgatttgcgcatgacgctcagcgattagccgatcaccattttgaaaagtaggttgcatcgaaggacctgatactgtatcgttgctcaagacgaagtggaaaagcagcagataggcaccgatcaaaataacccagataattaagatatctaggaaaaacttaccccatgattctttttcttcttttttctcagccattatttttctccatttatctttttccacagtttacaactttatggagaaattgccaaattacaaaaaagaggtgtaagtgtcaatgtttttgcggtagcctttaaaccattagtctaaccttaatttcttaaatatttatatgacttaaatttctgcttagcttgcttaaataactattgccagctacctgtgcggttaatgcgccatgctggatgcctaaatgaacttcatgacgcttctttaagctgtcacgggccgctgcttttaattcctgttcagtcaatacagttatttctgaatcttcaaactcgctgctaagccaaaattccagctctcgattcttgatgcagcttaagatcctaagcatgccttctgctccagattttgaccatttcttgccttgccccttaacacggtaggtatacttgcggtggttgctctcgcagcagccaatggctttagtcacagtcagttttcgtttcttaaacggcttaatatcgtcccaatgacgatcaatataattccttaggcgccccagataatcatgattgagctcggtattcaattcatcaattagtcggctttctgcagtggttaggatagttttaactttgtcatagctgtatttgtattccaaagcagaaatcagcttgccttgcaggtcaggcgcaaaatatagcctttctttgattttcttatttaggtgaaagacatccaagaaatgctcatgacgcttgcatagccctacaatgtcatcgaagtctgttttggcatatccagcaccgccatcggcgttgctaagaattacagtatcagaaagatcataagtattggccaggtactccttggcttcgttcagcgcatcaagtcggcttaaagaaacaaattccttggcattgattcgctttctgcgtttcttgcttatattgacaatgccttcacagacctgatagcgatgaaattccaaccggcttttagtgcctttgatcaccacgccatcgccttcaagatacaaaactgggacctttttcttagtgcctgcggcatcatatcttgaatctgcttcttggcccgctttaatatttttcccggccatttttaccaaattgcccacctgcatatggctaatattaaagccagacaggcaattgactgctagagcagtattgcgataagtggcaacgctgcttacttctaagatgtttttgactgctaaaatactgtagcgcttgtatttgtcaaagcccattaattcatccaagggataccttgcttgtttgcctgggcagacatatcttcttctgacatacctaacttcgccaaaagccatattgattgagcgctcattcttcttatcaatctgatagccctgtgctttaaccttggtaatcatttcatcatcaactttagctaaagccaaggccatgatttccttaatcaggtttaagaagaaacagattatttttctttcacgcttaatataattatcttcagactttataatatttgcgatttcagttacaattgaattcataaaagaccagcttctaatgtgttttttgttcttaacatcagactactggtctttttgtttgagctcaagtccaaattcaaaggacttgggcttttttaattatttattcaacttaccgtaaaaaattatacacttagaaaaggaaactgtcaaatcttttgtgtaaatagatctttctcgtaaattgattttttaattatttatttaatcaaagtaggattctaaggtgtcctgaacctgaccaaagcctttatgaattcgattgaaataacggtcattgtagctcattgcctgaatgccaataaaagcatcaagcgactgttcagttggaaactctgccttaggcttagctttgcgcttgatcacattgttaaatgattcaatcatgttagtcgaataaattgaagctctgatctgcttgggatagttataaaagaccagcagatctggttctatgtctttcaagcttctgataacatggctgtaaaccttgccccatttggtatagaagtcatgcaggacagctgtggcttcttctttgtttgtctgttgatgcacctgtttgaattcgttcatgatcttttcacgatcgtcgacgcgtactttagcgcagatattgcgcatgacatgaaccaaacagcgttgaaaatgagctttaggataagtcctggccaaggctgttttcatgccaacaacaccatcagaaagaaaaagctcaacttgctttaagcctcgggatttcatgttttgaagcatatctgtccagacttcaatgttctcgctaggtgcaatgcagtagtcaatgacctccttgtgcccattaggcttgatgccaatggcaatatagactgcttcacgctcaaatgtttctcggcgcaaaggaaggtatgtcgcatccaaatagacgcagaaaaacttgtcgcttagcttgcgtttgtggtaagcctcaacctttggaatcatctgcttggaaatatttgatacctgagctggactgtaatggctgccatacatcttttcaattagatcggctatttccctggtggtcacgcccttggagtaaagcttgataatcatgctttccaagatatccgagtgctgcttgtagtcaggcagcgtgtgctgatgaaattgaccgttgcgatcccggggcacttgcacttcaattgggccaaattgcgtatcaactttgcggaaataagcaccatttctagagttgccagtattccagccatttctggcatagggatcatagcccagaaaggcggtcaattcagcttctaacaagttattaacagcctgttgtagctctttgcgcaataaatcatttattttgtctggattgaatagagcttgagcaaaatctttggtaaaatcattcatgaaggagttcttctttctgtatgtgtttttttgttcaaaccaatcatacgagaaaggaactcctttttctaatgtttaaagaaataaatttaaggaatcattcatccttacacaaaatattttacagtctctagaaaagaggtatttcctaggaaatacctcttttattattaatgactattaattagtcttcttttttgtcttcagttttagcttcgtcttctttaaccttttcttcaacttttggagaaatatcaaagattgcttcaccgttcaagtacaagtgcttgtcatctgcagtgaattcgatcttcttagtgtcaggcttttgtaagatcaacttagcagctggagtttcaagattttgttcaactactcttctaagtggacgagcaccgaacttcttgtcgtagcccttttctgccaagaatgccttagcttcgtctgaaacttctaccgttacacccttcttagcaagaacatgagacatcttcttcaagtaaatgttgatgatcttgcccatgtcttgttcagtaagtgagttgaatggaacgattgcgtccaaacggttcaagaattcaggtctgaagtagttttcaagggctgagattaacttgtcttggtcaaccttgccatcttcaagcaacttgtctgagaagccggcgtttgaagtcataatcaagatagtatccttgaatgaaacagttctaccttgtgcgtcagtcaaacgaccgtcatccataatttgcaataatgcgttgaagacttgtgggttagccttttcaatttcatcaaataaaatcaatgagtatggttggtgacgaaccttttcagttaattgaccaccttcaccgtagccaacatagccaggtgctgaaccgatcaacttgttaactgccatttcgtcttggtattcactcatgtccaaacggattaagtgttccttgttaccaaataattgaattgccaattgtttagcaagttcagtcttaccaacaccagtaggtccagtgagtaagaatgaaccagtaggtctgtcgctgtctttgaaaatttgcttacgagcaatagcgtcagtaattacatcgatagctctgtcttgatcaataacattcttcttaagtttcttagctaagtccaagttcttttgagcttcatcagcgtgaagttcactcattgggatcttagtcttttgttcaataattgcgtagatgtctttttcagttacttctggagtattcttagaatctacattcttaagttgtttctcaagttcagcaatcttactcttaatttctgaagccttgtcgtaatcctctgccttagcagcttcagtcttcttagcttcaagagctgagatttggttctttaagctcttttcatcagttggttgtacaagcaatgccttcttagcaccagcttcatccatcaagtcgatagccttgtctggtaagtaacggccttgaatatatctttctgataattcaacagctaatttaagactgtcgtcactgtattttacgtggtggtagtcttcgtacttcttctttaagccttccaaaatcttaacagctacatcagtagatggttctggaacttgaacagcttggaatctacgtgataaagctggatctttttcaattctttggaattcactagtagtagtagcaccaattaacttcaattgaccacttgccaaagctggcttcaagatgttagctgcatccccattgttgttttctgaatcagtagaaccagcaccaacgatgttgtgaatttcatcgatgaataaaacaatgttaggatcgctcttggccttgtcgataaccttctttaatctttcttcaaagctaccacgaagacttgaaccagcaaccatgtcattaatgtttactgaaatgatatgcatgttagccattttagctggtacattgcctgaagcaattctttcagctaaaccttctacaatagaagtcttaccaacaccagcaggtccgattaaaacaggattattcttcttacgtcttgaaagaatttcaattacgttatcaatctgttcgtcacggccaattactgggtcaaatttattgttcttagcttcctcaactaagtcaacaccaattggcttttcattgggttgttgtgggttctgttgaattgtttgtggtgcagcacccatgctgctggagtaattaattggaattgaacctgaattacctttgctatttcttctgctaccaaagtcgtcattaaagaatgagctattcaattcgttaaataagttatcaaagtcattgtcaaagtatgccatatgtgcaacactccctatctcaaatttacgtctttagcactctagcttatcgagtgctaactcattacatttaatagtatagcaggttatccacagatttcaagctaaaaaataaaagttttacacattttcctttatttttgtgatttttatttaaaaaagcactacaaatgctgcaatataaacatttgtagtgcttcacaaattataaagaatttcttaagatgggcaaaaattgatgattattttgcttaaaactgttgaattttaaggaagttttccacagataagaataagtttattaccataaactatttctgcctacctctattattgcccttttgcttgtccagtattttgcggttcgctcaactttctcggctcaagcaaatactgtttaattactttgattacctgcttattctgaggtaaatccgagtgatccgcttctacacccgttactgtcattgcagtatagctcttgacttgattctgaaaaatatattttccggctgctacgctagcttctggtacaattccatcagactcataattttttccaccagataaggaataaacaatcaagtttttcggtagtttatctttgttcttgataaagttttctagcatttgcgttttatgattaatatttttttcaccaaaattatatggcgttcctagcgtcatcagacgtttgattttaatttcatcagaatagtaacagtagtaatgttctaaccaataggtccagatcaagccaccgttagaatgcccaaaggctttaaaattattaaacttgtagctctctgataaggcataaaaggcttgatcaaaccaactagcttgcttcttaatattgctataaccatcgtgattattttcaaaaccaacaataatgaaaggctcattgtcgtttttattgattttgcctgaatatgacagcgttccattcgttgaaactttaattttaagcacgctatgcttagtcggtgtgttctgatttagctgcttcactaattggttaaaacgttcagtcgttgcactagaacctggaatcataattactggtgacaaaagcgatttgcgtctttcagctctagcgtggttatcagccttcatccaagaataacccggaatagccaaagctactaataagactaagacgattgccaaccatttaaaattaggattttgaactaaattaatcatttttttcttcataatcctttagtcccctttcaagtcgcaaacctaatttcatagttggaataaacattattatatccaaaatgaataacaaaatagaaaataccaagttgctccagtcaccattggaaccaaagaaagagaccaaaattcctggtgtcccacttaaaacggggtaagcacaaggttgaattaaatggcaaaaaattgctccagcggctagtagaatattaataattggaataatcacaatcgccggcagtaacaacggatttaaaataatcggcatcccgaccatcatgcctccagttgagccaaaagctgctggaagcaggttaaccttggcaatattttcactatccttatttttactataaattaggataattacaatcatcgctaaaacaatactcgcaccacccatttctgcataaggataaaacaaagaactacccaaatacttatatggtacattccaagcactcccatgttttaaggcaaaatttaagttagctgctgaaatactattagaagtagttgacaaagaagctagaggataacctattcccatccagctaagtaaaaagactgggatagtcagtaaagctattaacaaaatattatttgattcctgtatttgagtaactaggcctttaaaagtactagaattcaagaatttgatttgaaattcataaattataatccccagaactatcccacaaaaaattgcaaatattgtcgggataaacgcattccaggctctttccttaattctagcggcatgttcaaaatcgactggcttgtgttcctttcctagccaatgaaaaatttgccctacaccatagccaattaacaaggccagcaagacagcattaatttttaaaacactggaagaaaatggtgaatgatcgctggcattattagctaaattattggcataagcacaaaacatgataacgatgacagccgtcatcccggccatggttgaatctttacggtataaacgcgcagtataacgtgccgcaaaataagccgcataaataccaaataagccgaaggttacccgaaccatcccctgactgacaaatgctcccgcataccaaaaacgatctggcaaagtgatatcaaaattaaaaatattgtaaataaaactatcgggcgaaaaaacggcatctctgaacaacttaaaatatgccccaattaccgcgatcggcatcagcataaccagcgttcgctgaaaaattctaaagattgccaatcttcttagtttaagaaagatatttgtgattctgtttaccatggtattttcctttacctatctattctaaatatgattgaataaagttaattaaaacaattattaattatacatctatactagaaagctgattatgatggcttacattaacttaaaaaataatactaaaatttaccaatctggtgacacaaccatctatgccaataagaacattactttttctatcgataaaggcgaactagtcattattctcggctcatcaggagctggaaaatctactttgcttaatattttaggcggaatggaaccaaatacaagtggcgatgtaattgtagcgggaaaaaatattgcaaaatataacgctaaagaattaactacctatcggcgcaacgacgttggcttcgtttttcaattttataatttgattcccaacttaacagcaaaagaaaacgttgaattagctgctcaaattgtccctgatgcgatgagcgccgatgatgccttgcagtatgttgacctagggcagcgagaaaacaattttcccgctcaactatcaggcggtgagcagcaacgtgtggcaattgcccgagccatcgctaaaaagccagccttacttttgtgcgatgagcccaccggtgcccttgactataaaacaggcaaacgaatcttaaaaattttgcaaaatatgagccggcaaaatggctcgacggtcttgattgtaactcataacgccgctattgccccaattgctgataaggtcatccgtattcacgatggaagtattcaaaaagtccagcataatctacatcccgctgatattagtacaattgaatggtaggtgggcgacatgcaaaaaactattctatggaaagatgcttggcaagcaatcacccattcacttggccgttacattgccattattctattaattgcactggggacttttgcctttacaggtttaaaaatggctggtcctgatatgcgagcaacaggggcagaattttttgccaaacataacttagctgacgtcactgtcacttcaaactatggcattaattcaactgatcgccttactattcagaatttaccggaagtaaaagaagctacttttggctattttcaagatgttaaaattaaaaatcaacctgatacgctccgcatcttttctcaatcagataatctttcaagttatgaattgattaaaggacattttcctaagaataaaacagagattgcactgtcatatttattgcagaaaaaatatcgcttggggcaaaacattacttttaataaacctggcattttaaaaaataagacttacaagattgttggcttcgtcaaagctagtgagttcttagataaaaatcaaatcggtcaaaccaacattggcagtggccatttaactggaattgcggttgctaatcataacgccttcgccgcaccagtttatcaaattgcccgaatcattttcaaaaataccgccaatttaagtccctttggcatagcttaccgcaaccgtgtttataacgatcaaaccaaattgcaaactgctttaaaccaaaatcgagccgacaaatatgacaaatatcgggccatgtatcaaaagcaatatcgacaagctgcagctaaacaattacttaaacgtggcatcgtagttaacccggcgcaaatcaaagtaccacagaacaagcttaaaattgcttatcctaactacgtaatcaacagccgtgaagaaagtcagggttatgcttcttatcgagcagattctgaacgagttgaagttttggctaatgtctttcctgttttcttgtttgctgtagcggctttggtcagcttaactacaatgatgcgttttgttgaagaagaacggactaatattggtacgctaaaagcactaggctatggtaatggagcaattgccattaagttcttgctctatagcacctcagctgcaattttaggtgttattctgggggctagcttaggttacacctttttgcctaacttaatcatcaaggcctatttagctagctcaaccttaggaactgattaccagctgaattttgcttggggaccactattaatttcattgacgattgcactacttgcaacaaccgtcgtttcaatgattactttagctcaaactctgcgtgaacagccttcagctttacttttacctaaaccacctaaaaatggttcacgtattttactagaatatattccatttttatggaagcacatgagcttttcagctaaggtaacagcccgcaatattttccgttataagagcagaatgctgatgaccatcctaggcgttgctggttgtactggattactagtaatgggatttggtattcgtgattcactacacggaattggcaatattcaatattctgaagtacaaaaaaatgatgtcatcgctttgaaaaaccgccatgttaacacgactgagcgacaaaaattaaacaaaatttttaccagccatgatgttacgcaaactactgctgtacaatatcaacaattgactaaacaccttgatagcactggagcaactgaaaatgtaatgctaattgcgccacaatcaactaaaaactttagcaaatctatcaatttgcaagaacgtcaaagcaagaaaaaacttgttttgtcaaataatggtgtagtcatttcagaaaaattagctactatcttgcacgctcataaaggttcaacaatttccttaaaaaatgaacatgggaaactacttaagttcaaagttagtggaatctgcgaaatgtatctcggtcactatatctttatgagcccagctgaatatgccaaagaaactggcaaaaaatttactactaatgcctatttagtaaccatggccaaacattccccaggaaatatcagccatattagtcaaaaaatgatcaaaacaggcgcaatcgaaacggttgtctcaacttcatcaaatagaaaattgctgagcagtttcactggtagtctaaatgaagtcattctaatcctaattttaatttcagggatgttggccttagtagtcatctataacttaactaatatcaatgtcgctgaaagaattcgcgaattatcgaccatcaaagtgctaggattttacgataatgaaacaacgatgtacatttatcgcgaaacaatcatcttatcggcactaggaattatcgtaggctttggctttggctttggttggtggctacaccactttattatcactagtttgccaccagatgtcgcgatgttcgatccgaatatgtacccgttgaacttcgtcttctctgcgctaattcccgctattatcaccgctattttagcaattgttgtccatcacaagatcaagcgaatcaacatactagatgccttgtcctccattgattaagcgctgttatgctataataatcactatagaaaagggtggaaaaaacatgccaagaaagcactttgaattaaacagtgatgttaataaattaatcgaaaaatatgatgaaattaataatgttgatttcaataagttagttaacaaggccttaagattctaccttgttaatcaaatgaactacaaagatgttcaagacgccctgaataaagctgataacgaagcttctaagtatattgatgaagcaatgcgttccagcatgggtgatattaatcgaaattattagaacataactaatcatggaaaaagccatctgttttgacagcaggtggcttttagtattcattacaagataatttattataaaaacaactaattgataatttctttactcaaaatgcttataccgataatatcgataacctatctttttaccaaaaatcgtctccgaagttttcatccaattagccagcaaaacataaatgcctaaaaagactaaaccgaagattgctaaataaccaaaactaccaacacggcctaagtcgttgaaacgatagccaaataaaatttggtaaacaaagagcaggataatgtaaatctcgtttgaaacaatgatcggcaacaaactccccatcttaacgccatatgtcttattaagcttgtgataactgagccaaattaccagtaagaatgaaatatcagttgaaagaattgcaccatccccattcatgaacatagtcatcggtacttgcaaaattatttttactaagacaccttcaaccatatagatcacagccagtttgttcatgttcaaagctaaaagcagtgttaatgaattcatcaccaaaccagcaaacaaactttgaacaatattttcaaccaaataatacgcacctaaactatcgtgtgagaacaagaccgtataaattggagaagccgcaaaagcaccaagtgcaacaaccggaagcaagacaaataatagtagtctatagttctctaaaagcagctttctaatgctttcttgactatcattagccttatacttaagccctgctaaaagcggcagactagtctcagaaacggctgtcgcaagtgaaataatcaccgtggtaatcttgcttggattagccgagaaaattgtgtacaagtaactaacatagcttttactcatatgactgaagctaatcaggatttgtttaaacaaaagttgatcaactaattgcgtaacagtaatgaacgatcccagcaaaacaaacggaattgaggcataccataagttaagcaaactacgagaaacattattaagtgctctgggctcgctattttcaattaattctcggtaatgtccccactgcttgcgcatatatgcaaaaagatacaggtaactagctatagcaccaacacaggcgccaaacacactgaaataaaccgccgttacgtaatcatgatggaagacttcaataatcaacaaagtagccagcaaaataaacaaaattcgagcaaattgttcccataattgggaaatcccatatggcttcatatcattatttccctgaaaccaacctcgaaccatactcattgatggcagaattactacggctggcactaatactcgaatagaaattgttgcactagccactgaatccactggactatttttggcaatcattggtgccgtcacataaagcaaaataccacacgctattcccatgaccagcataatagcgaagcctaatttggtaatgtacaaactgtctttatatctattttgcgaatttaattgcgatacttcccgggcaataactgaaggaagtcctgccgtcccaattgataaaaacagcgcatacggcgtatatgacgaattgaacagcgcctgtgcgtttaattggttgtggtagcttcccagcataattagccaaggaatcaaataaacaaccccgagaattctagatacaatgctaccaaacgatagccaaaatgaaccggataggatttttttattcaatagaatagcctcaaatctacgttagtttctcattgtgccttcttattatacgtggattttataactttgtgggaaatatgtaccaactagttacccttttttaacaaatttttcggctctaataatacaaatcagttacattatttactatattgttacccagcctttaattttacgttagaccccttgacctaaccttctttaattattatccttaaaatgtttctgttaaaggtcataattagacaaaaataataatgtattaagaatattcatcgggggaattaagttgtcattcaagaaaaagattatcactaaattagcttatgttgctatgctttcaactactggcgttgccgcagctgcaatcgtgcaaccacaagcacatgttcaagcttctaccacttcagttgctgctcgctcactcggaatcgatgttgctagttaccaaagtgctgatctttcagctcacgctaaaagcggtgctaagtttgctgttgttaaagtaagtgaaggtaccagctacagaaatcctaaggctagtgctcaaatcgctagtgcccgcgctaagaatatgatgccaatgggctaccactttgctacattttctgctaatagcgctgctgctaaaaatgaagccaactacgcaatcgcatcagctaaggctgttggtcttggtgctggctcataccttgcatgtgactatgagtcaggtgacggcaacaatatctatggtggtaagaatcctactgctaatgcaattaatgccttcatgagcaaggttaaagctgctggttacaagccacttctttacgctagttcatcagttttaagaaacaacattaacactaactctgttgttaacaaattccctaactcattatgggttgctgcatacgctgtttcaggtcgagtagacaatcctaactttgactacttcccatcaatgaagggtgtttcaatttggcaatttactgacaactggcgtggtcttaacgttgacggtaacattaacgttttacctcttacttcatcaggtagcgctgtttctcaagcacctaagaaggctcgcgtattaaagaagaaggctcatgtatataacaaggctggtcaccgtacaggcaagactattaagaagggcacttctatcactacccatggcaagaagaaaactatcaatggtaagaaatactacaagattgccaagaatcaatacattagatcagctaacctttactaaaaaggcaaaataagtcatcaaaaaatgcaccaggtagaaattacctgatgcattttattttatccaattttttacttggcgaattgttcaccagctaagttacggtagaagttagccttagcttgacggtaatatgggttaacccacaataaaccgatcccgcaggaaataataccaagtagccaccagccgatgaaacttaaatcaaaaataaacaagtccatcttatggccatccatcaacttacggctggcactgatagcttctgtggcagtcggctcatgaccactatctagcatgtcacgcaagatatatggtgtcactgcatatgaataagccttgatcagccctggaataatcagtaaccaagtccacaaaataagaaaaatttcatataaaatataagttaaaaagttactcttaaagtttctggtaaatggactaaagatacctgaaagaacattttccttagtaccactatctctaaaatgcaagatagtataaattacgccccatgtgattaagccaattgcaactgaaactaccaaagtaatcagccatgcaaaaggattaactcttactttatctaggtacatcaattcagcattgttaccgaagcggcggacaataccgtacacgatatcttcgcccttttcaaaaaagttttcgatatcggtcaaaatataaacgattagccagccaacaaatgacagcaaaactgcccagccccagttaccacgtaactggtctctagcttgttcttttaattcttttcttgtagtagccattttctctcctcctcacttttctaatcatgagtattgtcgcctaaaatcagggcagaatcaattaaaagcacatcaaaaaagcctaattccaccaacatcggaactaggctcacacagtgttgaccgccactctgaccacatatagaagataacattttcgctaccggagaaaatgactactaatagcgacggtacatgatagattttagcattcaactacctaaaagacaagcgaaaagacgtgttgaattagcggaatggataccaaaatttacggataaaaaagacgaggtctaaacctcgtcttcttcattactaaaattcaagcatcatcgtcattgcacgattgatcttctttttaatctttttaaactcaccagaagcagtatgattatcctgcaaaatgatcatgttctggccatctttagttgcccgcataaaggtataatacccttcaccagcaccattagcagctttataatgctttaaattataaagtccaccattataatagctaggagcctgacccttgaacagaacttttctactcttgttagtcaaaatcttaccagcaagaatatactgcatggtcttagctaaatctgcgttagacattacgattgaaccagcacccagctcattgtgagcatccttaacggctttagcatggttcactttgacatattcaccctcacgcatttcatagcctggtacccaatgactagccaataacttagccttgtctgaccacaagaactcactatgggttagcttcagtggcttgatatatgtgtcatggaacaattgctcgtatgactttttctcaagcttggacaagattccacaaaggaaaatatagtttactgaagtatagtgccacttacctaatttgctagcatcaaacacagtatattgtgcatcatgcttgatgttcgcttcatcagagataaactcaggcgtacctaattgttgaccagctttcaaatccagccctgatgtcatatcaattaagttgctaatcttgactgaactagcaccatctacatttgggtagaattttgaaagtttatcgctaagcttcaactttcctttctctacctcatgcatcaccattgcagctgtcattgacttttgaactgaattgatcaaatagctagtgtcaggtttattgtccgtcgcataattaagcaaaactttgccatgatttattactaaaactgagcctttaacgcccacatggtcaatagcctggcgcactattccgcttttaaacggtctttattgcttaaatcaactcgtttaacgttatccttgttttgccacttcttggagtagaagtagttagacatatcatagtcataacgcttattaggttccttcatgaatggacgaacagcttgatcaactgcaacccagcctttccagcctaggtgaatagtatcttgcataaagtacttttcattgcctcgtcttgaaagatctgcaatattttcaaagccttgactggttaactggtgttccatcttagcaacagactcttggtacatcttgctagataaaccagtgtacttcatccacttgccattaattggtgggatgataaatagcacattagtgtgttgcttagcaaactgctccaacatcaattggaaatcaccatattctactgaatgtacatagtcaaaatcacgctgactacccttcaagcgtttcaataccttctttggtaaacgtgttctaaagaaggtattatcaatacctaagttgtttgagttagtgtgtatagcagcttgctctgctgcaaccttattcaaagcagctacagaatacttgttaggtaaaaccttagctctcttttgaatcttatttacacgatcacgcaattggaatgagctgaagaaattatcttcgttacgcaacattcgacgacgattttgtaaataaaatttttggaagctagtcaacttcttgccttgagcaatttgcttaaggctattcttgatctcgccctttacatttggcatttccaacagacgtttagctgcataacgatcagttttattattcttggcactaagcaagaaattacatgcttgcaatggtgaataatacaatgcaaaggcattaggatcttgaccccgcttagtaaaccattgtggtgaaatgatcacaacagccttcttgtttctaagctgcttagctgttccttgcatccccaagaactgagccaaagattgactacccggtccacctaataagaatggacggtagtttctatgatacttttccgcaattacactagggtgaagtgggtcgaatcttgacaactcacttgaaccatagaatggcacgtagccatcttcaaaagcttcctgcttcattgtgctgcccttgaagacagttgtgttttgtgaagctgcagcctcgtaaatcgtttgcttagaaaaagttctttcccaaggaataaggaaaacaactaacaaaaggataaaagcgcaaagaactgggccaaagatttgccacagccggcgtttattactcattttctaagctttccacctttgccacaatcttgtttggagtgtcccattcttcacggttaaattctgaaacaggaacatcaatatcaaacttttcttgcaagttcaaaagcatttgtacacttgccattgagtccatcaaaccattgtcaaagatgttttcatccatttggtctgataaatcttcaccagttaagtcatttaaaatatctaatacgccttgttttgtatccataattaatacctctcaaaaaacaactcaatacttattctacttccagccgaaccacagttgacttaggaaccctgagaaaatcaagaaactgaaacatactacattgaaggttaagaaaatggcgaaccatttagtaaacttgttagatggaatttgcttcttatgctttctcttgaatctaagccacatatcgttgatacaaatagctgaagcatggaagataccataaacaatataataccacgttaagccatgccagaaacccatgattaagaacaacaggaagtaagaaacttgtgataatctaattcgattcttaaacattttcttcttcattgcaaagaaagtgaatcgcatgtagatgtaatcacggaaccagaatgataaagtaatgtgccaacggttccaaaaatccttaatgttcttagaaataaatggcttgttaaagttcattggtgtatgaattcccataaagtatgagattgatacagcaaacaatgagtaacctgcaaagtcaaagaacaggtacatactgtagcaatacatgtaagctacaagccaccatgatagcttcaagccgccatttgcattaccaacggctaaagcagcagcactgatctttggtaacaaataagtgccaaagaaccaaccaatcacaaatttgtataaaaagccttggaataagtatctaacagcatactgcatatctgtaatgtatgcatcacgcgtaggtaccttatcataatcttttttaaatctgcggtaacgatcaataggacctgacgaaatagttgggaagaaaagcaagaatcttgcgtaagtaacaggatctactttcttaattgccccatcacgcatttccataataacttgtactgtcttaaaggttacgtatgagattcccaagaaaccaatgacaaagccaattgagttatcaggaaaagcggtcaaatatttaactgcggctaatggaataattgccaaaatcacagccaaactaaagatccaagtcttatttttaccgtggtgacgataatactgataagcaaaggttaaggcaaattcgtaaaccaaccagattaataggttaaccccttgctcccagtgatcaccatcaaaaatcaagaacaagaaaacaattgaaaaaattgcttcatatgtcttgagtcgatgaccgtaatatagcccaatgataattggaattaaagcgatcatcaaatagatgaaatattgcggattagaataaggctgtaagttaatgaaattaaaattcactacttattaacctccttaattaccgccttaatatctaccttaccattttgtgaaataggtaatgcatcttggtagatgtaacgctgtggaatcatgtaaggcattatattcttagctaagtcttcacgaatcatcttagttaaagcagcttcagaatactgacgacgaacgccttcttttaattcgatttcggcaacgatctgcttaacagtgtggtccttattgtacttaggagcagcaacgccataacggacaagcttgttcttagttaagtagaaattgatttcttcaagttcgattctgtaaccattgaacttgatttggaagtcaattcgaccgcgataaaatagcatatcgccatcaaagaaaccagcatccccactccggtagctacgatactcagcaccatcttcatggaaaaaggcagcttcggtcttttcaggattgttcatatatcctttagaaacactaggaccactaatgataatttcaccttcgccaggcttatcacccttagaagtatcaattgtaatcttagtgtcttcttttaccttaccgattggcaaacggtcatactttttaagaacttcatcagtaatttcaacttgagtaacagcaactgttgtttcagttggaccataggtgttgaaaatatgactatctgggaacttcttcttaagcatctcagcttcactgtgtggcaattcttcaccacagaacaagaaatgacttaagtctggatggtgttctgcatcaaaagtcttgtccaagaagcacatctgtgcaaatgacggagttgatacccaaacattgaactgcatctttggcaaagtttggaataatttaccaaagttttgagtaacatcatgaggcaaaactaccaacttaccagcagaaacaagtgctggataaagactcattactgacaaatcaaatgagtaaggtgcttgtgccaagaaacttggatgttctggcaaattaaagtctgacaactcccagttaacgaaactaagcaaattgtcgtgactaatttgtacacccttaggtttaccagttgtacctgaagtaaagataatgtagtagttctcatcaccttcaacgaagttcttctcgtcaacttcaaaattgtcgtcttcaacttcgctagccttaagaaccttaacatcagttaaatcaacttctggtaacggatcaatttccaaaactagtggtgacttagaaacgtcttgaatcatcgttaaacgttctgcgttagaatagctagcaattggaatataagcgtgacctgacttaacacaaccaagaaaactagcaatcatttcaaaagtttgtccgccccaaatcataattggagcatgctctggaatatctaagctagcaattttatgtgcccacgcatttgaacgctttttaaggtcaccatatgtattagtttcaccgagatagtcgtaaacaacacgatctggttcgtttgcggcgatctcatcaattttcttaataacatcttgaatcatgtgatagcacctaccttaaaattcattataaatgaagtgaacagatgttagtccactatattcatataaatagataagagccatcaggattccgaaataaacaattgttttcaaaacaaacataccaatacgtctgcctcgagaatcaaccttcgtctttttattcattttttctcctttaggtaatcttacttttgcctttgccctatattactacaaatagtggcaacaaacgcactaacggcttatattttaacaaatttaaactttttcttaaatcttcagttatttgtttcaaattgcgaatgcgttttctttactgttgtctcttgcaatcccgataagcaaaaaataatggaataaagataactattgccacaaaaatcaaagcaaagatcattaagcgccatacattctgtggtttagtccacattttactctttgccgtcgccaacaaaaatgccgcaaataaagcaataacaattacttcaaccaggcaaaaaattaaatgagtattttgccagagatataagtaggttgttgccggaaataaacaaaaccaccctgaaaagcgtaaaagaaagatttcttttttacgataatctactttcattatagtttcctttcctcattaactgccaaataacgcattaatattcaccgacaaaatccggtccataactacaatttctggtctggcgtagatcttagagcctgattcaaacacacatagtagttgtcccttataagcggtaatttgctctaaatatggcggcatggtaattaccagttctgcattcttttcgtctaaagcatttaaagctgaagttggaaaaacgtagagcttggaatcaccactaccataagattggctcaaaaaaattttattttggtaaattgcaattccttgaatttgcttatccattgaagtttcgccagttggatcggaccattgcagcgttccggtaacagatttaacttcattattagtaattgagccacgatttttaccactacgcgctatagtgtaagccgcaacttttcctcgaccatacatgttaaaaaagccaacaaacaattgaccatcataatatgtaacggtcgatgctttttcaactgcaggaatggcaatttgatatttatacttaattggtatttggctgccctctttataggcccttaattctgccattgaaaatgctgctagcgctgaagatttgcccattgagccagttatccagatatttttggctactggatcataagcaatcccacctaggtgtggccgaccaggtatttgaatcgttttaagatatttgcctgtcttcttatctaagacataaacaaccgaagcatgctcatgttcaccatcataagcagttagcaaaatatacttacctgcaaccgtaatcccctgtggtgtcattgcagttgctgtattgacctttttagttttaaaatcataacttttagtagcaactaatcccggcaaaacaaagtcttttccatcccacgtccgcggtggtacataattggcaactttattaataaaaggatatttttcacgcaatgctttttggtaattggcaaaattatgccaagcaggactagtgcttgtcccatccttagcaattttttcttttggccgttgacggatcatctcctgcttctgccaccattggtaaccgaaatagcctcctgcaccaatccctgcaagcaaaagcagtactagcaggaagcgcaaaattcttttaccaatttttttcaaaaaattactcccttctgtttaggaattgtccctattatgcaattcattataacgaaaaaacaattactttttgtttttaactccttgctataagctttatttactaaaaagataaatttttttgcaaaaaagtgctttcgtcacacttttttcacaaattaaggttatactagtaaatgtagtgaggaagaataatcctctactacaactcaacttttttgtttttcattcatactcctccaagtaaataatgaaaataaaaagaattgacttactccaattagtcaatttcatatctatccctttcggctcacgtgcgttgcgtgagcttttcttataccttaacttattctcaagcaaatctttaccttttcataataaattgaacacttttacttcacatttacccagtattatataaaccgtagcaagatggtagaaacttgctacaatactcccacttttttatttcattcattcttactcctccaaagtagatgaaactaataaggtccgcaaaaacttgcgggccttttcctttttcagcacttttttctgtataattaaggtagaaatgaggtgccgctatgttttcaccatcaatcaaacatttaatagaagaaaaatctggttcatttttaatccctgctagccgaattgcctttgtccaagcagacaatcctctttatcatgcctttttgattttgactaaggttaaatattcaaaaattccagttttagataaagaaaaacgagtcgttggcctgcttagtttggaaatgattacggacaagatgctgacgactgatgagatctccactgcccctttagataaattaaaggtcgaagatgtaatgcaaactaagtttgataaaataaacttcgttgaaaccaccctagaaacgcaactgcatctgttaatcaataatgctttcttgcccgttgttgatgatcgcggcgtgtttcagggactacttactagacgcgaatggattaaggcatttaactatgtagttcacacttatgacaaacactacgaaacaaaacgaataaaataacctccaagcagcctttaaggctgctttttttaactccaacatttattgagcaaaaatgtgtccagaccaataaagaatgttagaattaagcggtagacagatatgtttgtattttggggagggcaattatgaaaaatttaaaacgtcaatggaagtttattgtcgttttgattactggtgcagttggattaattagccaatttgcattgcattcaaagagcctattctcaatcgggaatcttcaatttccagttcatgccatcattattgatatcattggtatcttgatggcaatttctttactattggaaattttccacgattggaagacaggccgttacggcgtagacatcctggctgttatcgctgttgtttctaccatattgattggtgatgtatgggctgaatggatgattttggtaatgatgaccggtggtgaaacgctggaagattacgcaactggtcaagccaacaaggaattacgtgccttgcttgataaaacgccacgtatcgccaacaagttagttgacgggaagatcaccgaagttaaggttgatgacctgcaggtcggtgatactgttttgatcaagccaggtcaacaagttcctgtcgatggtcaaatcgttaagggcacttcaagcttcgaccaatcttcattaactggtgaatcagttcctgtgaccaagaaccctggcgacgaattaatgtccggttcagtgaacggtgatgtagcggtagagatgaaggtaactaaggctgctaaggactcagaatatcagtctattgttgcgttagttaagtcttcacaagctcaacctgctaagttcgttaagatggctgaccgttacgccattccgtttaccgttatatctttaattattggtggtgtcgcttgggctgtgtctggggatgcaactcgctttgcggaagttatggttgttgcttctctatgtccactgttgatcgctgctcctgttgctttggtatcagggatgagttcaatgtcagctcaccatattattgttaagtctggtccaaccctagagaagttggctcgcgctaagacctttgcttttgataagactggtactttgactgaaaaccaattgatcgttgaccaagtcgttactgatgacaaatcatttgatcaaaaagaattgcaaagcttagctgccagtgttgaacaacagtcaagtcacgttatcgctagttctctagttaaggctactgacaaggatttaattcatcccgtaactaaccttaaggaaactaccgctcaaggtgttgaaggtgatgttgatggcaaacacgttaaagttggtaagttatcctttgttgcgccaggtcatgaaaaattaaacgtcacttcaactgctgtttacgtttcagttgacggtaagtttgctggttacatcactttgaaagataagatgcgtccagagagttctaagactattgaacgtcttcgtcgtcaaggtgcagaagatatcatgatgcttaccggtgaccacaagcaagtcgcagaaaaggttgccaaagaagccggcattactgatgtccgctcagaacttttgccatcacaaaagattcaagctattaaagatgtgccaaagcacctacgtcctgtcgttatgactggtgatggtgttaacgatgcacctagtctgaccgctgctgatgttggtattgctatgggtgctaagggtgctactgctgccagtgaaagtgccgatgctgttatcatggttaacgatatttctaaagttaacgatgcagtcgctatttctaaacacacaatgaaggttgctaatatcgatgttttaactgcaattggtgtcgttattatcattgaattgattgccttcactggtgttatcccagccttctggggcgctattttgcaagaagtagtcgacatgattacgatcagcttaggtttacttgctaagactaagccaagtgataagcaatttggtttggaagaaaaatagattagatgtgaagaagctccagaatcgatttggttctggagccttttttcatacataattatgcgtagcactgcaccagttcaatttgcatctaagttaaaaaactattaagattaaactcaactaaataatttttagtggttgggtttttatcacaataaaaactttcaagattcgcttctttgggtcaggaagcacttgaaagttttttgtttttttacagaaggggaaaatatgcattttttaggacaacttgtcttaatcctcttaactacagttttgctggggcaattattcgcccgcttcaatatgcctgcagttattggacaactattatcaggaattttactgggaccagctatcttaaattgggttaagccaaatgatatcatcagtctattctccgagttcggggttattctgctgatgttcttagctgggcttgagagcgatctagatttattaaaaaaatacttcaagctaagctttactgtcgccacagtcggcgttatcctacccgttgttttcatgggcttagccagttacttctttggcatgcgccctcttgaagcactctttatcgggattgtctttgcagcaactagcgtttctatctccgttgtggtgctgcaagaagcacaccaactgcacacccgtgccggcacagccattttaggtgctgccgtagttgacgatatcttagccgtggttgttctgagtctattcactacattcagtcatgaaggtggcaagagcggcttaactaataactttttgcttaatatcttgattgaagtagtttacttcgtagttgtttggctgatttttaaatttgttgcgccatactttatgaaagcttctgaaaaaatcgacgttgactattccgtcgttatcggttcattggttttagccttaaccatggcttgggccgctgattttgttggtctttcagctgttgttggtgcatttttcggtggtttagcaattcgtcaaacaccacaatacaaagaagttcactcctctgtttccgcaatcggctactctgtcttcatccccgtcttcttcgctgatatcggtctttcaatgacttttgccagctttttcaaggatatctggttcattatcgttatgaccgttttagctattttatcaaaattctgggccggaaaatactccagcgaaatctttggcttcaataagaatgaaggcaatatcgtcggtgctggaatggtatcacgtggtgaagttgcactgattgtagcgcaaatcggaattaaccaccatctcttccctgaggatatttattcaagtctgatcctagtaattatcgttacaacagttatttcaccatttattttgaattactttattaaaaagagtcaaaatagtacggaatttatgtagaaaaagtctagcattcgctagattttttaatagtttaattttacaagtggcttatcataaacgcaattgtgtctacatggtaaaatcaatagtgagaggtgagaaatatgttacaaactccaaacaatattagagctgttaccgctcgtgacctgcgcaataattttaagaaaattgctgatgatattaatgactatgatactaccgttatagtagctcgtcccaaagataaaaatgttgtgattatttctcaaaaagaatatgattcatggcaagaaacttcatatcttctaggaactaaagctaaccgcgatgcattagctgaagctaaacaatcatttgaaaaccaagatcaacgaaataaagttttaaccccagaagaattcgaggctttaactaaagatgacgaagcttaaccttaattttaactacaatgcctggaatgaatatcttgaatggaaaaaagaggataagaagacttcccaaaagattgataattttattaaagaatgccaacgccatccttttactggaaaagggaaacctgagccattaaaagcgaatttaagtggtgcatggtctcgacaaagtaatcataaagatcgcatggtttattcagttaccacaacagaattacaaatatggcagttaaaataccattattccaaatgaaaaagctctttcgagcttttttgtttaacccaattttcctaaatcgattacttggtcatacttctgcaactcatttgattcatagtggtgaattacttcaataaaggtaaggtttgagtttaacaagtaattatgaatttgatctgatgtcttcttatcaagggatgcattaatttcatctagtagcaaaatcgatctatcggccaaaattgcccgtgctagttctattctagctagctgtcccccagacaattgatccgcattatcacccaaggaatagtcccagcccttttcagcaataatttgatccaaacctaatttttggcacacctcgctcaccttttcccgggaaatatttgcacctaaagttaaattaaaccacaaggtatcggcaaaaattactggggactggctagcataagcgaataaatctgtaaacgagcctggcttttgctttttgtcgttaagcaatatttccttggcatgaccatgctttccggttaataggaattgtaataacgttgatttacctacaccagatggtccaataactgcaactttttgaccttttacaactgcaaagttaatttgattagctaattccttgccttttctagtaagatccagatcttctatttgcaaatttgcaaaattataattggtctctttcttttcaaccttgcccttggcaatatatttttctgccttagcgacaattttcttagttgttgataatttgtttcgatcttctaaaatagtcaaaattggattaagaaatgaatttgacagttgaacgattgcaaataaggcacctaaagtagtttgacccttaaccaccatgtaaattcccactaagaatggggttaagaacgtaaataaactagcaatcaagttaatccaagaattagtatctagattgagtaagttcattttacgcaaagcatcttctaattgattgatcaaaacttgatttttcttaaccgcattatcgcgcttgttgtataaatttaatgttgtgctaccagccagaaagtttttaatatgactaacatatttatcattagcagttgtccaattttctgctgcagtttgaatcttcttttgaaataaattagaaaccagcatcggcaaacatgaaccgattaaaaataataatgtaactaaccaattaacacataaagcataccctagcgcaaaaacaatcatataggcctgcatcattatttcaatttcagcatcaaaacgattagtttccagcagcttaaaatctgtagtcaaaaagcctaagctagcagtattttcttcgctagtctgacccagcatcccctttaaaatgccagctcgcagcgtcgtattagtctcttgaatagcacttgtttttaaccgattgaaaatcagcgaagcaataaaagtcgcaataaacgccccaataacaataactagaaattgtgctaaatcgccaaaccttctttgcgtaccaacattggtcaatgtctgtaccatatatgcaaaaatgatttgttgtgtactagcaatcaagcctaaaatagttaacataatgaattttgcatgtgaagaatatttgtaaatcattttttgtcctcctgtattttacttgaggctagtatcgcaggataatgacgaaaaatgttagaaatttacagatctgcaaatcgaggtaaaacattatgttcaaatatggttcaatttacaaacaattgcgcaaagatcaagaaatcactcaaactgaagcctgcaagggtatttgttcaatctctaagttatcacgctgggaaaataatcaggtagaagttgagtttagcaccgccattgcattactcaggcgcatcaacattacgcttgacgaattcacgcattacgctgcaatgaaaacagaatttacattgccagacgacattataacggccattaaagacaatgatacaaaggtactcgaaaaatttgttcaggagcagctaaatcattatcacgccaacaaaaatattctcgaactcaaaaacatcattcttgtctgcaatcaattatttctcatgactggtaaaaactatctaacacctgcagacattaatcgaatcggttcatacctgcttcacaacaccgtttggtctaaatacaatatcttgctttttgctaactcaccgtttttgctaaattctaaaatcggctatcaaattgctctgcgaattattcacaattttcaccctacagaaagtttaaacgaaaatactactattttcatgggcggtttatctgatacagttattgccttagttttcaaaaagaagctagattacgctcaaaaaattcttaatgaattaaaaaagataggacttcccttctatctcatgttctttagttcaacattgacccttttacaaaaaattatcgactactgccacactctcaacgcacagcctgtattggcaatgattgatgccatagttcagctaaattgcatggaagttgctaaaaaatggcttgagatttttaaagacgtacaacaaatctggccagaaaaagaaaattaaaaaccgtaaaagtaatttactttcacggcttttgacatggtattcattatgcaagcttacaaatttttagcttttaattaatccttaacaacgtctttggtgttcaaccattgactcttgttgatcttaacgatcttcttgccagcagctttcttaacatccttagcggtgtaagttgaacccattgaaaccttttggctagtcttgtgaccttgtgcgtccaaaacattaactttttggttcttagtgtcctttacagcaacaaagatcttgtcaccctttttaattgcaggatcagttggcatagtttcggcaacacctaactttggagcagtaaaactagctgcttgactaactgaagcaccaacacccattaaactcattgaagcaactgcgattgaaacaactttaactaaattctttgaaactaacataatgaatacctctaatttctatatcacttaatttgttggaactttttgttccctcattccttacgtctttattgtataacatatgttattaattacaaggggtttatcgaattttttaaaaataattcagtcgtctcaaagtattgctataataacgattgcggggattttttgtccaaaagcattaaaaaagtgtctgagaaaccgttctttcccaaacacttttttaagcagctgctacttcgtttgaattttgagtcacttttctagtttttaaactgacaaaaatcgctacaattagtgttattacctggattactaataatgtaaccaaagcaacagtaacattgaatgaaccagaaattgtggttaatactgttgtcataattggagcaacagccattaagattgtatttaataagccaacagttgaagccaagattttatgatcaactgatgttactagccattgctccattttaactgaagcaactcctgcaatagctgccaagaaaaacattgttatcataattacgtaagtatttcctaggaaaatgcttgttgtagtaacaatacttaaactggcagaaataattactaaactaaaaactgttaattttttgaataattgtggtccaaacattgaacccaatgcaaagcctgcgccaataaccacaccaaacaaagcaatagtaaagctataagtgccgattagcatagttgaacgatgagctgcaagtacaattgttgtcaatggagtaattgtatctaaagctccatttaataatgcgattactaataccacagtcaataatcctgattgtttcttcacttgggtcaatgaagttttcattgtttggaaaaagttttgatcattaacttcctttttttcaagtggcttctgatccttctgatgttttaagccaacactggcaaataacaaacctgctaacaagaaagtacctgcattaacaaaggctaaagttgagtatgacattactagcaaaagtgctgaaccaatgaattgagcacccatactaataatttgatttacgccgccattaaagcctactgcattcccgtattcttttttaccaacaatatcaacaattaatggtgcaaccaagccacctgaatatgaaccaatagtatctgataagaaattcacaacaacgatgattaaaaccaaattccactgtgacattttagtgataaacaataatcctactaaaccatataagataaatcggacaaatgctgctaaaaagatattgcgaaactttttcttagtcttatcagcaaggtaaccaccaaagatctcgaataattttggaactgattcagaaattgcaattaatgaaagtgctaatgagtagttttgtaatttgctagcataagtcatgaaagccaagtagaaaagaatatcgcctgcgcctgaaagaaaactagctactgaaaatcttctaaagtctgcgtttttaagaaatacgttcataaatcttacccctttttctttgtttcgtttgttgttgaaattataataaagtgaaaaagaaattaattttaaaaatggcgtattcgacattcggaggataaacctatgacaattggtgaattactcaaagaaaaaagactagcagaaaacaaaactcaaaaagcatgggttggtcatattatcagtacttcttattatgctaaagttgaaaagaatattcatagaattacagcagaggatttattagccattcttaaacataatgatctttcaattactgactttttcgaagaattagcagacaaaaaggatgaactaaaagcacaagtaaactcgctaaataaaacagtaattgatgctgtttatcattctgatgtttccaaagttaatgaagtcattcaaattattaaaaaaatggatctaccgactaagcaaaaacaagaacttatcttaatcaataaggggtttatcgaaactatcaaaaatgatctaagtgacaattatcagccagataaaaacatcgttcaacaactaaaagacaaaatttttagtattcctaattttaatagattcaaacttgaactctatactaatttcatgcaattttatgattatacaactaatattatgatcaccaaacaagtgatccataaaatagatcagtttaagagcgataaagagttattagcaatcgctggtattctattcaatctcctttcacaattagtcgaagaacatcattatcaagaaactgcaccatttatagcagctagtgagcatttaccctttttaccagacttatactttcctcaaaccggaatctcattgctaaaataccttattagttatcattttaataaaaaaacagcagacttagctaaagctgagatgattgcacaaacttatcaaattactggtctagaagactttggtaaaggtgcacaagaaattattaatgaagttaaagaggactagctttaagctaatcctcttgtttcaatctctaaataaaacctaacgcgttatagcacatgtgcaccaaaattgaatagcgcaaatctttggttgacatatagacccaagctaaaaccatgcctaagacccaatatactaagatatacttacttaatgccggatcatgcatatagccaaataaaaatccgcttgcaacaatacctagccacttatttctagtatttttcttagtgaaaaagatattgaaaaacatccctctaaagatatgttcctcacaaaatggcgcgatgaaaactactaggatcctaaataaacctgcattgtattccgctattttattcaagctttcctggttctttgaaacgccgccaccaactagattaagcatcacaatcgaacctactacaatcagtacaaaaccgatcatcgctattccgattctgcgccagtcccagtgtggtgtttcatcaaagccccaatcattttcttcttttaattgcctgcgataaatataggaaattgcaaacaaaactattaccgtagcaagcgccgtaacgaagacgcgatattgcgccaaatcaaatcgctgaggtctaaagtaaagtacttctaattcagaataaattaccaaagccaacacagcccctgcaatatttcccaggtaatgtccaaatctcttcatttttcattcacaccttgattctttcaactagtaatcattgtttctattataatgtaaataagaaaaaatacctaaggaggagtatctatctatgcttaatcagatcatcgcttttttggggagacgcggtgagttcttctacatttcagtctttatgttactgatattttttgcctttttaatctcttggcttatcgaaccaagacgtttgattaatggcgttttgtttactatctttatagtctcaatgctctcttggatcaccgttatggtgcacaaaagtacgagtcacggcttgcaacgtgcctatgacctactagttctagctgcattatttggcattgtcttattattaattttcgcctggatttttctattctggaatgcctatttcgtttggaaatatgaaagccatactttgcctaacttgcttactttaattaccggatttttagcattaattattagtattatcgtgctcttaggaccaggtaagtacttgccacgttggcttagtctcgcattagcttcaattcccgcgattgcaatttatttgggattggtgctttacaactttttggtaaacttgcttctatatcaaatttatcctcgtacctaccaccaagactatttaatcgttctagggtctgggctaatcaatggcgaccaagtatcaaaactgcttgcggctagaattaatcgggcaattcaatactctaaccgccagtatcaaaagggccgcaagcgccctatcctgatcatgtcaggtggtcaaggcgctgacgaaaaaatctctgaagcactcgctatgtctcgttttgcacaacggcgtggcgttagtgttgaccgtatcttattagaagatcaatcgaaaaacacatacgaaaacatgctcttttctaagcgtattgccacaaaagattttggtaattcccacttcagggcacgcttctttagcaataattaccatatttttagagctgctctcttggctaaggaagttggtttaaaagccaatggtgtcggtgcttacaccagattctactacttgcctaacgcaattatccgcgaatttgccggtgtgtttgtcatgcataaacgccgtcatttcgttatcatgggattaatcgttttattctttatcctgcaagctatcttagtcatgacaggattagaaagatttactgtaatttagaaaagagggatgcaatgcttcaactaaagcatatttttaagtcatataaggtgggggacaacatcacccacgctttagacgacgttacaatctcgttccgtgaccaggaattcgtcgctatcttaggtcctagtggttctggaaaaactaccatgttaaacgtaattggcggacttgaccgttacgaccaaggtgacttgatcatcaacggcaaatctaccaagaattttaaagagaccgactgggatgcttaccgcaacaataccgttggttttgtttttcaaaattataatctaatcccccacttgtcgatcatcgccaatgtggaactagggatgaatttgtctggtgtgcctaaaaaacagcgccatgaaaaagcaattgcggcgttaacagaagtgggattgaaagaccatctaaataaacgtcctaaccagttgtctggcggtcagatgcaacgagtagcgattgctcgagcaattgccaacgaccctgatattctactttgtgatgaaccaactggtgcacttgatactgagacttctgtccaaattatgaagttgatcaaaaaactatctaaagatcgactcgttattatggtgacccacaatcctgaattagctaaagaatacgccacaagaatcgttaatttccaagacggtaagattcgtcatgattctgatccttttagccctaataaggaagaagacaaatttaacctcaagcgtaccaagatgtcttactggaacgccatcaagttgagtttcaccaatattatgacaaaaaaaggtcgaactctgctaactgcttttgcttcaagcatcgggattatctcaattgccgtagttttagctatctctaatggttttcaaaagcaaatcaataccacaatgagcaaagctttagcaaaatatccgatttctatttcacagaccgcaactgacattacttcagctaatgcacgtaaagaatcggataaaaatgtcaaaaaccgcggctatgtaacggcagaacaagaccaaagcgaacaggcccaacacgttaataaaattagcacaaagtatgttaactacatcaagaagatcaatcctaattatgccaataacgtgtcttaccaacgcggcgtaagcttgaatttattagctaaaaacaagggaaaaattgaacgcgtgcaattttcaaatacggatcctgatcagactaattctgttctagctgctagatcccaagcgatgagttcaatgggactgggttcaagtgtctttcccactactttaaataaagagaaagactcatttttgaagcaaaactatcaattgctctcaggcacttggcctactaaggcaaccgacttggttttagttactgacaataaaaatactgttaacatcaatgccttaaaaaatcttggtttcgatttaaagaataaggaacacgtcaaattcggccaattagtaaataagcaatttcgtgtagttgctaacaatgattactatcagcaattgccaactggcatgtttattcctaaaaaggtaaataacgccatgtataacggtgctcaaaccaagctaaagattgctggtgtcattcgtcctaaaaacgaagattcaatggccttgttatcaactggaattgcttatagcgatcaactttcacaacgcgtgattaatgaaaataaaaactctgcaattgtaaaggcacaaaagaagagtaaccatagcgtattaactaaccaaaaactaaatgccaatgaaaagaaagctacaatgcagactcttggcggtaccagcatccctactggtatcatgatttatcccaacaattttgatgataaagataaagtacttgattatcttgacaaatggaacaaggggaagaaaaaatcagacaagattctctatactgacatgtcaaacgctgttaccacaatgactagcggcctcttaagcgggataacgaccatccttgtcgcatttgctggtatttcattaatcacatctatgattatgattggtattttaacttatacctcagtacttgagcgaactaaagaaatcggggtactcaaggcattaggtgcccgtaaaaaagacattactcgtgtctttgatgccgaaaccttcatcctaggtgttttctctggtgtattaggcattctgattgcttacctactaacattcccaattaacagtatcatttacaagattactgatctggcaaatgtagcccaactagatcctactgctgctattgttttgatcattatttcaactatcctcaccctcttaggtggtcatattccagcacgaatggctgcaaagaaagatgctgcaattgcattgcggagtgaatgaatttaataaagaatttgttacgttgttcacaataacctaaatttttagcaaaatatgtggtatcttagctttagcaaaaacaagtaagaaaggaacttttttcaccatgactgttaaaaaattagaaaataacagcgatgttaatgtagtggcagaagaaagcaaagttttaactgatttattgaatgaatcaactaagcaagtaatcggtcaagcagctttcgataagatccaaaacttaattaaaatctctgccgccaaagattatcaagaacttgaaaagcaaattgctagtcttaacaatcgcgaaatgattgttgttgcacgttattttgctactctcccactcttgatcaacatttcagaggatgtagaactagcaagtaaagttaatgtgcttaacaatactcatcaagattatctaggtaaattgagtgacacaattgacattgtagcccaaaagaaaaatgccgaagaaatccttgaacatgtaaatgtagtacccgttttaactgcccatcctactcaggtacaaagaaaaaccattttggaattaaccgatcaaattcatcaacttttgcgcaattatcgtgatgtgaagaatggcacaattgatcgcgatgaatggactgaacaaatgcgggcttgcattgaaattttgatgcaaactgacattattcgtggtcacaaattaaaggtagctaatgaaattaccaatgttttggcttactaccctaaggctttaatccctgcaatcaccaaatttactagtcgttacaaggaattagctaaaaaacacgggctaaacgctagtcatgctacgccaattaccatgggaatgtggatcggcggcgaccgtgacggtaacccttatgtaacggctgatacgctagaactaagcgctactttgcaaagccaagtaatctttgaatattacattaagcaaatcaataagctttatagagccatttccatgtctacttcttatatggagccatctgacgatgtaatgcacctatctgagctttctaatgatgattcaccattcagaactaacgagccatatagacgggcattctactatattcaaagccgtttagtgcacactgaacaaaaattactgaatattactaacaagaacactttcttaaagaaacgtgacctccaaaatcttgataaaatcccttgttatcaaaatgctcaagaatttaaagccgacttagaaatcatcaaaaattcacttgaagaagaccatgatcacgccgtagtagacagctactttactcaaattcttgaggctatcaacatcttcggcttccatctagctacaattgatatgcgtcaagattctagcgttaacgaggcctgtgtcgctgagctacttaagagtgctggaatttgtgacaattatagcgatttaagcgaagacaaaaagatcaagcttttactcaacgaattgaacaatgatccacgtaacttacacgccaataacaaacccaagtctgagttactacaaaaagaattaaagatctacaagactgctcgtcaattgaaagaccgtttgggtgaagacgtcatcaagcaacatattatttctcacactgagagtgtttcagacatgctagaacaagcaatcatgttaaaggaatacgatttacttgataatcaaaaagcccgaattcaagtggtaccactatttgaaacggttgaagacttgaataatgcccgggaaataattaaggaattcttaagctttgatatcgtcaagaagtggcttgtttctcaaaataattatcaagaagttatgttaggctactcagattccaataaggacggtggctacttagcttcatgctggaacctttataaagctcaaaaggatctaactaagattggtgaagaaatgggtatcaagattacctttatgcatggccgtggcggtaccgttggtcgtggtggtagtccatcatacgaagcaattacagcacagccattcaagtcaattaacgatcggatgcggatgaccgagcaaggtgaaattatccaaaacaagtatggtaataaagacaccgcctactacaacctagaaatgttagcttcagcaacaatcgatcgaatggcttctaagcaaattgttagcgaagatcatgtcgcagatttccgttcttcaatggatcaaatcgtagctaaaagcaacgaagtttaccggaaactagtatttgagaatcctaacttccttaagtacttcttccaagcaactccaatcaaagaaatctctggtcttaacgtaggttcacgtccagcttcaagaaagaaactcactgacttttctggcttaagagccatcccttgggttttctcttggtcacaaagccgtgtaatgttccctggttggtatggcgtaggttctggtttcaagtcatttatcgatgctgatccagccaacttgaaggaattacaaaatatgtaccaaggttggccattcttccactccctgctttccaatgttgatatggttttacctaaatcaaatatgagaattgccaagcagtatgcggatctttgcgaagatgaacaagttaaatcagtctttgatatcatcaatcaagaatgggaactaactaagaaagtcatcctacaaattgaaggtcatgatgaattaatcgaagatgcacctactcttaagaagagtctggaatacagaatgccttacttcaacattttgaactacatccaattagaaatgatcaagcgtgatcgtgaagatgtgattcaaggtgtttaccaaagtattattccaattactatcaacggtgtggcttccggtttacgtaattcaggataaaaaacacataaaattcagctaaaaaaggctcctcattgcctgttttatcaagcatttgaggagcttttttttaatttattaaactttttagttacgcctttttcataactaagttaagtggcgttacaattactggaacgacaatggctgtaaaaattgcttctactaaaccgttcatgcccagtgccataattaaaattaaaatcaatggcgtacctgaactataatttcctaggtaatgagttaagcttgctggatcatgcatgaagaaaatactcgtcagcaaaataaccatcacggtattagttaacgaagtgactgctccacttatgatataacccaatttcgcatatttagtcttactcatacccttcgcaataattcccgggaaatagccagccaaaatacttggtaccaatgaaattaccggattttggaacaacattaagctgaccatatcgccaggttgagtatatgcaacaatcaatctggtaataccccagaataagccaaagcctagacccgccttttgtcccattaacgtgccatagacggcaattgtcattggaatagtagttacagctggcaaagccgggataattcttacatagccaacatttggcacaaaagtctgtacaatcaataaagcagcaaagacagcagtaattgctaatcttttagtttcttctcttctcatatatttctccaacttaattctttagactcaattaaaccataattaagattttttctcagcaaaaaagtttattatacaatatctaggtatattttatctagagactgtaaaatagtttgtgtaaggatgaatgattccttaaatttatttctttaaacattagaaaaaggagttcctttctcgtatgattggtttgaacaaaaaaacacatacagaaagaagaactccttcatgaatgattttaccaaagattttgctcaagctctattcaatccagacaaaataaatgatttattgcgcaaagagctacaacaggctgttaataacttgttagaagctgaattgactgcctttctgggctatgatccctatgccagaaatggctggaatactggcaactctagaaatggtgcttatttccgcaaagttgatacgcaatttggcccaattgaagtgcaagtgcctcgggatcgcaacggtcaatttcatcagcacacgctgcctggctacaagcagcactcggatatcttggaaagcatgattatcaagctttactccaagggcgtgaccaccagggaaatagccgatctaattgaaaagatgtatggcagccattacagtccagctcaggtatcaaatatttccaagcagatgattccaaaggttgaggcttaccacaaacgcaagctaagcgacaagtttttctgcgtctatttggatgcgacataccttcctttgcgccgagaaacatttgagcgtgaagcagtctatattgccattggcatcaagcctaatgggcacaaggaggtcattgactactgcattgcgcctagcgagaacattgaagtctggacagatatgcttcaaaacatgaaatcccgaggcttaaagcaagttgagctttttctttctgatggtgttgttggcatgaaaacagccttggccaggacttatcctaaagctcattttcaacgctgtttggttcatgtcatgcgcaatatctgcgctaaagtacgcgtcgacgatcgtgaaaagatcatgaatgaattcaagcaaatccatcaacagccaaataaagaagctgcgatcaaagtcttgcacgccttctatgacaagtggaacagagcgtacaaccatgtcatcagagatctcaaagagattgagcctgatctgctggtcttttacagctatcctaagcagatcagggcttcaatttactccaccaatatgatcgaatcctttaacaacgttatcaagcgtaaagctaaacctaaagcagagtttccaaatgaacagtcgcttgatacttttattggcattcaagcaatgagctacaacgaacgctatttcaatcgaatccacaaaggcttcggtcaggttcaggataccttagaatcctactttgattaaataaaagattaaaaaatcaatctacgagaaaaatctatttacacaaaagatttgacagtttctttatctaatatgacaagatattgtattttttattatttttttacttaattatgcattatccttactctctctaatgcataatcgtgttctataccaattaagaatccctttatatcaatactttatgttgtatctaagtgtataattttttacggtaagttgaataaataattaaaaaagcccaagtcctttgaatttggacttgagctcaaacaaaaagaccagtagtctgatgttaagaacaaaaaacacattagaagctggtcttttatgaattcaattgtaactgaaatcgcaaatattataaagtctgaagataattatattaagcgtgaaagaaaaataatctgtttcttcttaaacctgattaaggaaatcatggccttggctttagctaaagttgatgatgaaatgattaccaaggttaaagcacagggctatcagattgataagaagaatgagcgctcaatcaatatggcttttggcgaagttaggtatgtcagaagaagatatgtctgcccaggcaaacaagcaaggtatcccttggatgaattaatgggctttgacaaatacaagcgctacagtattttagcagtcaaaaacatcttagaagtaagcagcgttgccacttatcgcaatactgctctagcagtcaattgcctgtctggctttaatattagccatatgcaggtgggcaatttggtaaaaatggccgggaaaaatattaaagcgggccaagaagcagattcaagatatgatgccgcaggcactaagaaaaaggtcccagttttgtatcttgaaggcgatggcgtggtgatcaaaggcactaaaagccggttggaatttcatcgctatcaggtctgtgaaggcattgtcaatataagcaagaaacgcagaaagcgaatcaatgccaaggaatttgtttctttaagccgacttgatgcgctgaacgaagccaaggagtacctggccaatacttatgatctttctgatactgtaattcttagcaacgccgatggcggtgctggatatgccaaaacagacttcgatgacattgtagggctatgcaagcgtcatgagcatttcttggatgtctttcacctaaataagaaaatcaaagaaaggctatattttgcgcctgacctgcaaggcaagctgatttctgctttggaatacaaatacagctatgacaaagttaaaactatcctaaccactgcagaaagccgactaattgatgaattgaataccgagctcaatcatgattatctggggcgcctaaggaattatattgatcgtcattgggacgatattaagccgtttaagaaacgaaaactgactgtgactaaagccattggctgctgcgagagcaaccaccgcaagtatacctaccgtgttaaggggcaaggcaagaaatggtcaaaatctggagcagaaggcatgcttaggatcttaagctgcatcaagaatcgagagctggaattttggcttagcagcgagtttgaagattcagaaataactgtattgactgaacaggaattaaaagcagcggcccgtgacagcttaaagaagcgtcatgaagttcatttaggcatccagcatggcgcattaaccgcacaggtagctggcaatagttatttaagcaagctaagcagaaatttaagtcatataaatatttaagaaattaaggttagactaatggtttaaaggctaccgcaaaaacattgacacttacatgttgtatgtcaattttgacatagccactaaatattgttaatctagttttgtgttaaaaatcatttgatggagagaggatcaattttatgaataaaaaagtcaaaaaattactatctattggtgtgcttgcattgagtttaggtgcaattttaaccgcctgctctggtaaaaaacagggtgcaagcaataataaatcaagcgatgccaagcactctattgcattaattactggcggtaatggtgtaaatgataactcttttaaccaatctgcttgggaaggatttcaaagttatggcaaagagcacaacttgagccgcggtcgaaacggttatcaatattttcaatcaagtagtgctgctgatttcactcctaattttgatcaggcagctaaagctggttatcaaactatctttggcgttggttacagtttaaaagatgccgtagcttctgccgccaaacgctatcctaaaaagaattttgccattattgacgatgtaatcaagggacaaaagaatgttgtctcagctaatttcaagagcgaacaagcttcctacttggctggtgtcgtagctgctaaagaaaccaaaaccaacacggttggcttcatcggcggtgctcatggcgatattgtcgacctttttgatgccggatttactcaaggtgttaaagatcaagccaaaaaaatgcacaaaaaagttactatcttaaaccaatatattggcaactttactagttcagacaaggccaaatcaattgctcaatcaatgtacaccaaaaaagccgacatcatcttccatgctgctggtggtgctggtgatggtcttttccaagaagctaaagccattaatcaaactagaccagctaaagataaagtgtgggtaatcggagttgatgtcgatcaatctcatctcggtaactacactgctaaaggtgggcaaaaatctaattttgttttgacatcagtaataactggagtaaatgttgctgtcaaagatatcgccaatagagcttataataataaattccctggtggcaagaatttggtttatggacttaaaaacaatggtgtttctattgaacgaggacagatttcagcttcaacttggaaagatgcccaaattgctagagctaatatcctaaaaggcaaaattaaggttgccattcatcctaacaataaataaaagcatactagtatagtttgctttttataattacaatcaattattttttgcctgatcaatatttttgttgacaaaataccgaacaattaataaacttatttataaattgtttggtattaatattgtggaggacagaaataatgaacgtaaagttcaagaaaattttatcatttggtgtcgttttagcatcagttggcttgattctaactgcttgttcgggtaaaaagtctggtcaatcagccaacaaagatactaaacatggcattgccctaatcacagatgaaaatggtgttgatgatcattcatttaaccaagctgcatggtcaggatttaaagcatacggcaaggaacatggtttaaaacaaggaaaaggtggttatcaatacttccagtctagcagtgccgcagacttcactcctaactttgatcaagccgctacagccggctaccaaaccattttcggtgttggctatcaattagccgacgcagtcaagcaagcagccaagaagaatcctaaaaagaatttcgttatcattgatagcgttgactctgggattaagaacgtcgcttctgcaacctttgaaagcaatcaagcttcttatcttggcggattggccgcagcttacaccactaaaaccaacaaagtaggtttcattggcggtgctaagtcatctattattgatttattcgaagccggttttaagcaaggtgttgctgacggtgctaaagctcttcacaagaagatttcagttcaaacccaatacatcggtaacttcacttcaaccgataaggctaaatcaatcgctcaatcaatgtatgctaaccgcgctgatattatttaccaagcagccggtaacgcaggtaacggtgttttccaagaaggaaaagattacaaccaagcccgtccagcagctaaaaaggtttgggtaatcggagttgacgttgaccaatctaacctaggtaactacaagtcaaaagatggtaagaaagagaacttcactttaacttccgtcttaaagggcttagatgttgctactaagtcaattgctaatgatgcttacaatggtaaattccctggtggtaagcacttagtttacagcttaaagggtaatggggtttaaatcaccaaaggtaatttaaacgctaaaacttgggcagcagtacaaaaggctcgtcaacaaattattgatggcaagatcaaggttgctactgctccaactaagtaattcagctgcttagtattttgagaactcttcgttttttagcgaagagtttttctatagttaattaaggaagtatttatttacatgaaagaacagagaaataaagtaatcgagatgcgtcatattgtcaaagatttcgatggtttcaaggcaaatgacgatattaaccttacgctctatcaaggtgaaattttggctttgcttggtgaaaatggcgcgggtaaatctaccttaatgagaattttatccggcttgcttgaaccaacaagcggtgaaattctggttaataatcaaaaagtaaatattaaagatccaaccgtcgctaaaaagttaggcattgggatggtacaccagcacttcatgcttatggactcatttaccgttttagaaaatattattctaggacatgaatcaactaaaggaccagttatcgatctgaaaaaggcaagaaaacaggtcctagctcttgcacaaaaatatggctttgctattaatccagatgccaaaatctctagcattactgtcgcccaacagcaaagagttgaaattctaaaggtactttatcgtggtgcagatattttaatttttgatgaaccaactgctgttttaaccccacaagaaatttctgaatttattaaagtactcaaaaatttagctaaagaaggcaaatcaatcattttgatcactcataaattagaagaaatcaaggctgttgcagatcgagttacagttatcagacgtggtcacgatgttggtacttttgctgttgatcaagttagtgatgagcggttagccgaattaatggtggggcggcatgtcaacatgaagctaaccaaaccagcacctaacttgggcaagcaaattctagcaatcaaaaacttacaggtaaaaggaaatcacggtgccttaagcgttaaagacctttccctttcaatccgtggaggcgaaattttagggctagccggaattgacggcaatggacaagatgaactggttgaagcaatcactggtttacgccatgttaagtcggggcaaatcttaattgatagtcaaaatttaaccaaccaaaaagttcgcaaaatcaccgaagctggcgtagcgcatattcctgcagaccggcaaaaatatggtttaattcttcacatgtcattagctgacaacttagcgctgcaaacttactaccaacgtcccttctctaatcatggcatcattaatcatcaagcaattttgaagcatgccgtagatttaattaaaaaattcgatattcgaactactagccctgcattgccagctagcgacttatcgggaggtaaccagcaaaaagcaattatcgctagagaattaaatagaaacagcgatctaatcattgcattccagcccactcgcggtttagatgttggtgcaattgagtatattcataagcagcttttagctcaaagagcagcaggaaaagctatcctattaatttcatatgaacttgatgaaattatgcaattatctgaccggattgctgttttgcatgatggtcaaatttcaggcgaagtattacctgaaaaaactacagatcaagaactaggtcttttaatgaccggtgttaagaaagaagatgcaacaattgattaaagttacacctaaagtcaaaaatattctagtaccagttatctcagtaattgctggttttatagttggtgcaattatcatgctgatttggagttataatccttttcaagcatacagctccatgttctctagcgcactgggcaatatgaatggtattggtgaaactattcgtgaagctacgccattaatttttattgctatcggttttgcaattgcctcaaaagctggcttttttaacatcggtttgccaggtcaagcacaagctggttggttgacttctatttggattgtattggccaatcctcaattgcctaagccagtattattgcctttagctattattgcaggcgctatagctggtgctattgtggcaggaattgctggctatttaagagctcaatttggaactaatgaagtaattactactatcatgcttaactatattgtgctctatacttgtcaatatttaatgcaacaagtaatgtcctcaaaattaagaattgataccgatactaccaaaacaattccagccaatggcagcttaaagcttaactggttaactagcatgtttggtgattcgcgaatcaatgctggtattttcttagcaataattggacttattttttattggtatttaatgaaaaaaactaccgttggttttgaaatcaaggcagttggactcaatccttttgctagtcgctatgccgggatgtcttctaaaaagaatattattatttcaatgttactttcaggtgcattttctggcttaggcggtgtagtacaaggacttggtacctaccaaaactacttcactcaaacaactagtttggatattggctgggacgggctttcagttgccttacttggtggtggaactgcaattggtattttattagcttcacttcttttctcaattttaaaaattggtggtttgggcatgcaaactattgccggtattccttatgaaatcgtatctatcgtaattgctgccatcattttcttcatcgctatcaattatgtcattggtttgctttttaaaactaagaagaaccgcagtgattactacattccaaccagaaaagaaaaaggacccaacaatggtgttgatggtccaggtagaaaagtaatcgaaggagaaaaataatgaatttcgttacaatgatggcgttaattgtttcatccactttagtttattctgcgcctctaatcctagcttctcttggtggtgtttacagtgaaaactctgggattgttaatattggcctggagggtatcatgaccatgggagcctttgcggcgattgtcttcaacctaactttcgcttcaacttttggtgcagctactccttggcttggcactctagtcggcggaattgttggtttgattttttcattgcttcacgctgttgccacaatcaattttcacgctgatcatgtcatttccggaacagtgctgaacatcatggcaccacctttgggtgttttcttgatcaaggcaatttatgataaaggccaaactgaaaatatcaccgctaactttggctacttcagctttcctggtttaagcagcattcccatcgttgggccaatcttcttcaaaaacacctctgcccctgcttggattgccattattcttgctattttgatgtggtggattttatataagactcgctttggcctacgcttacgttcatgtggtgaaaatcctcaagcagctgacacaatgggaatcaatgtctatggcatgcgttatgcaggtgtattaatttccggctttatggcaggtcttggcggtgccgtctttgctcaagcaatatctggtaacttctctgtttctactatcgttggacaaggattcatggctttagctgccgttatatttggtaaatggaatccaatcggtgcaatgctctcatcccttttctttggttttgctcaaagcttaagtattattgggcatcaactgccaggaatcgatcaaattccatccgtttacatgcagattgcaccttacgttattacaatcatcgttttggtcctcttcctcggcaagtcagttgcacctgccgcagatggggttaactacatcaaatcgaaataaggaaaaaaggttgtttcacatgaaacagccttttattttacacatgtccacatagttatccacaagatatagcgcttatatgtggtagtcttactatatcttgtactaaataacagctatcggcgttttctcagttggcattggaaaatcactgttaagcaatctaagctcatcatctgtaagtttaatcttttgtgttgcaatattttccttcatgtgttctacactacttgccttaggaatcgttaaaacattgccattgcgcatcgtccaagctagcattatctgatgaggcgtaacgccatgatcacgtgcaacaattttcaaattacgcgtaattcgaattgtgttgcccttgcctgaattaaatggtgaatacccaataaagtttacaccgtgctcttcttgccaagcttgcagatcaaattctgtcccacgttcactgatattgtataagtcttcattagcaaagcattcttctccacctggcactgtaaaaagctcctgcatatcagccgtatcaaagttagatacaccccaataacggatcaagccatctttttgtaatgcttgtaagccgtggatcgtatcagacaagcgatgactgccccgccagtgtaatagataaagatccagatgatctgttccaagacgttttagactggcttctagactctgacgttctagttttggcgttgcatgataggggtagaattttgaaatcaaaaataatttttcgcgatcatatcctttaatcgcttcaccaattagctcttcgctttggccatccccatacatttcggctgtatcaattacactcaggccatgatcaaggccatagcgaatagctgctatttcatcttttttctttttaggatcttcacccaaaccccagctaccaattcctaaacctgttagtttttcaaaattcatcctcgttcacttccttatgttcaaattttaacataattgattcgtaattatttttatcaatcaattgacaaaatggtctattccattttataatggactagaccaacaaatgaggaggacttaattatgaaagttattgttaccgaaaataaaattcaaggtggagcaaaagcatttgaaatttttgaaaaaggaatcaagaacggtgctaaagtcttaggtttggcaaccggctcaacccctgaaacactttaccaaaactgggtaaaaagcgatcttaactgtgaaaatcttaccagcattaacctcgatgaatacgttggtttaaccccagataatcctcaaagctaccactacttcatgcaaaagcatttatttgacaagaagccatttaagaagacttacgttcctgacggtatggcaaaagacgttgatgctttttgtaaagaatatgatcaaattatcaaagacaatcctatcgacattcaactattaggaatcggccgcaatggtcacattgcctttaacgaaccaggcactccattcaacatcggcactcatgaagttaagttaaccgaaaatactatcaaggctaatgctcgcttctttgacagtatcgatgaagtgccaaagagtgccatctgcatgggtactgctaatattatgcaatctaagaagattgttttgatggcttttggtgaaaagaaagctcacgcaatcaagaaaatgattgaaggcaaagtcactgaagaagtacctgcatcaattttgcaaaaacacccagatgtaacggtgatcgtagacgaggctgccgcacaagaattagacgacaaatacaagaactaaaaacaataatttaattatcagcatagaaaaagctaggctttctacaatcgtggaagacctagtttttttatttagcagcctgtatctacaatgaaatatacttcacaaaattgcatttttatataaaaaatgaagcataattcagttttttattgaattatgtttcattcctattcgattttttatttctacccttgacttttagatgtgaaacataatcaaaaaatcacttgtgtgccacaacatatcgtattaaacttaataattgtctacatatggtatttaagaaagaatgtgattcaagttattgttttaagtgggccaattggagccggtaaatccagtttaaccagtattctagctgaacatttagggactcaggcattctatgagggcgttgataacaatcccgtattgcctttatactacaaggacatgaagcgttacacttttttgcttaacacttacctccttaaccaccgtttagcacagatcaatcaagcaattcaagaaaaaaacagtgtctccgatcgttctatctatgaagatgcactgttcttcaagatgaacgccgatagcaaggtcgctgatccaaccgagttcaagatctacgatgacttactcgacaacatgatggaagacactcctggcaatccaagtaagaagcctgacttactgatttacattcatgtctcccttgatactatgcttaaccgaatcaagaagcgcggtcgttcatttgagcaaatcagcactgatccaggtttgaaagattattacgcaagacttttaaagtactacgaaccatggtatgaaaattatcatgcctcaccaaagatagaaatcaatggcgacaaacttgattttgttaccaacatggatgcacaaaaagaagtacttaaagaaattgatgaaaagttgcatgaaatcggcaacttataagaaaaagaaggaacgtgatgacagttattgttttaagcgggccaattggagccggtaaatccagtttaacaggtattttatctaaatatttagggactaagcccttctatgaaagtgttgatgacaatccagttttgccacttttttacgctgaccctaaaaaatatgcattcttattgcaagtatatttcttgaacacacgcttccacagcattaaagacgcgctcactgaagataataacgtcttagatcgttctatctatgaagacgccttattcttccaaatgaacgctgatatcggccgtgctacttctgaagaagtcgatacttactatgagttattgcacaatatgatgggcgagttagaacggatgccaaagaagaatcctgatttgcttgttcatattaatgtttcatatgatacgatgatcaaacgaattcaaaaacgtggtcgtccctatgaacagttaagttatgattcaactttagaggactattacaagcgtctgcttcgttattacaagccttggtatgagaactacgattactcacctaaaatggaaattgacggtgataaattagacttcatggctaatccagatgataaagaaaaagttttggatcaaattacagccaaactaaaagatatgggcaaattacctgaagattgggaaaagcctaccgatattcaaattgaagcataataaaaaccattcatttgcgaaattatcgtatttgaatgattttttgtttacagtgaatttttcgctttattgttgtataatttgaaaaaatgtgtttaaaggaggagtttgaaaatgatgttaaccgtaactggtggacaatggtttttcccacttgtcataatttgtctaattttgggtattgtcgcaaccatcgctcaaaagaaaaagctgactaaactaaaaagaataaccgataactttgcctatgcaatattagttattctcttaatcattgaatggattctatattttcaaaaacaatttaattttattactccagcaatctacacccttgttgtcatctatcttattggacggcaattactaatcagataccgttcttctctattgaaaaaattaggggctaaatataagcaactgacaattggacttgctactatttacattattttagttaccttattgcttttaatcggatctaaattttcaactatgggctggatcattgctggattagttatcgtagcctttggcttcgttagctacatctttgaaaaagacaaacaataatttcccaggaaataataactcgcatagagcttctatgcgatttttatttattcaatttttgctaatgccttcgcaaccccatcatgattgttatcagcagtaatttgttccggagcaaatttttgttttagttctgctggggcattacccattaaaaatggataccccacttcttccaacatatcttcatcgttatagttatcgccaaaagcaatgcaattttgcaagtctacgccatattcttgagcaactattttgactgcactagccttgcttacaccctttaaaacaatttctaataaattctctgctgatctaacaaaagtcaaatcaggatatttagcagttaattcttcttgcatacgatcaagatccgctgaatctcccataattagacctttatgcacgccctgcagtttttcaagttgattaattgtagtcggtgttgcttttacatcgacaattctttcttcatttttaacccgtgggctcttttcttcactacaataccaaacatagccactatagatattccaagctgcatcattatcttgctcatcaacgtagcggcaaatttcagctgcttcttttgcattaaaaaaacggctgattagtactttgcctgtttcatcaagggctaaagcaccgttatacgcgataaacggacaaactttcaaaatttgattaaccactgtcatcatccctttaggaagacgtgctgatgcaggaacgaaaatattaccattaataatttgtctacgaattgcatcccgcgttgcggcggttacctttaaatcatcattaattaatgtgccatcaagatctgaaaaaataagttgtgcggacattctttcacctttatttcttttttaattcttatatcctaggataatgctttatttatgctaatgaaagctgattcaattaaatgcttttcctatcatttaaagataaattgcaataaatgcccaagtaatcattaaaataattcgcgtttacaaatttatttatcaatgctaaagtataagagttgtgttcaataagttaaaacacgaacaatattttggggagataaaatgaattttataaaaagctactttcaattagataagtacaaaaccaacattcgaactgaatttattgctggtttaactacctttatcagcatgtcctatattttgtttgttaaccctagcgtactgggcgccagcggtatgaataccggtgcagtcttcaccgctactgctttagctgccgctcttggtactgcaatcatggggatcgttgccaactacccgatcggtgaggcaccagctttgggaatcaatgccttctttgcttacaccgtatgtattgggatgcatgtttcatgggaaacagccttggcttcagttttcgttgcatcaattattttcatcttaattactttattcaaattaagagaaaagatcattgattcaattccagctgacttgaagttcgctatttcatcaggtatcggtttattcattgccttcttaggtttgcaaaacggcaagttaatcgttgcaaataaatcaactttggttggtttaggttcacttcacgatccacttgtttggattaccatttttggtttgcttgtaactgttatcttgatgatcttaaacgttcctggtgcaatctttatcggtatggttttggcagctatcttcggtatttgtaccggtcaaattgcattgccacacaaggttatctcaactgctccaagtttggctccaacttttggtcaagctatcttccacgttaaagacattaacactgttcaaatgtgggttgttgttttaaccttcctgcttgttactttcttcgatactgcaggtaccttaatcggacttgctcaacaagctggtttcatgaagaacaacaagatgccacgtgtaggtaaggccttagcagctgactcaagtgcgatggctgttggttcaatccttggtacttcacctgttggtgccttcgttgaatcaagtgctggtatcgccgttggtggccgtaccggtttaaccgcagtttttgtagcgatctttttcttaatctcaatgattttcagtccattgcttggtgttttcactagccaagttactgctcctgccttaatcattgttggagtattaatggcacaaaatactgctcatattcattggaacaagttggaaattgcagttcctgcattcttgattattttagggatgcctcttacttactcaatttcagacggtttatcatggggcatgatcacctaccctatctgtatgcttgctgctaagcgtggcaaggaagtcacaccgatgatgtgggtactgtttgtagtattcctgatcttcctgtgggtactgaacttttagatgaaaaagaatagataaagaaaaggactaagttcgaatttgaacttggtcctttttgtgtattcactaacattactttttattcttatcgattataatcgataaaaacgtcaaaatcaccaatcttatcgagtataatcgataagattgcaaaaaaagagtcttttatcgactatactcgataaaggctcttttttatattacccaggaaatattaacgtacagtttctaaacaatatgattttttataataaaatgcgtcataacaggcgaattttaattggctttaaaatttcttttttctaaaaacaagatagcctaaaagggtaaaaagaactatatagcacaatgtaccaattaataattgtggattagagagatgggaggttaagtgataagttgcataattataatactgtgtcgttaaattgagcatattcaaaggattccaacgaataatatcaaccggtccaatattataatttaataaattagatgatagactgcttcccataaagataataattgcatttatcataataactacggtgtttgaattaatcatacaagacattaagcaaataaggctgattattaacgtagaggttataatatcaacgcctgttgttgaaagcatatttataaataatgactgattatacttataagtcgcagtccaaggaactatttttgctataagtggaacagtgttaaagaagatagttacaatcatagctatggcatgtagaaaaagattataaataaaaattgtaatgaactttgcaagatatactgttcctttattttgagcatgatatagtaatgtcaaaatcgttttgttttggaactccattgagaaaatagttgaacctactatgaccaaaatcaacataattatttggctagagttataacaagtcataactaacaaattgccatattgttttcccatggccaatcccataaaaatcataaaaagaatcataaaactgataatccaccaaggcagcttacggtgacctaacttatagaattcttgttttaattccgcacgcataaaagatcacttccgcctaaatagaccgctttttaaacagtaaagcgccaatccaaaagaaaactacagcgtacactaaattagcaataattaattctgaattagtcaaatgtgttacagtaaccatctcattattcgatagttgcgtaatgatattaatcatatttaatggattccaggctaaaattgatttcaaaccaggaaaagccgacattgctaaatttgaaagatctgaaccaagaaatccgattgctagtccgattatgatcactgttgcattattcctaatcaacaaaataagcattaaagagagggcaacgataaatattaaataaatcatcgttcctcccatatttaggaatagcgcattgattaagggatgtccatgataatcatcatgccaagaaaatttcgaaccaaccatcaaggtcttgagaataaacgaaaagattatcccaaataccagtaagatgaaactataaaaaactaaaacaatgaacttagctgtataaagaatggacttatgtgatgttttgtagagtaaggttgccatagtattatttcgccactccattgcgatcatatcagaactaatagcaataatgatgataatagcccattgtcctgcaccgaatccttgagataagagtgagggcgtcattttataacttgtaccaactgtatacaacattagtactaataaaacgagaatcccatacaatggaatcttgcgatgagcaaatttatagaattcgtgtgagagattaattttcattattatctcccccttgttcttgccgtaagatgttgacaatcttctgttctaaagttaagccagttggagccaaatattctatccagatttcattatcaaacagtagcttttgaattttatctatatctttatgatcaactattacagcatcatcttgtctatcaaaaggaattttagcttgttgtagcaaattggtagtttgctttatatcagttgtttttaatttagattttggatttttttcttgagtgaatttgctcataggtgaatttataataattctaccgtgattaataatgattaccgatgtcattactttttgtaattcacttaagacgtgactggaaattaagaaggctgtaccacgtgcagcgtattcatgtatcagttttcgaattaagattgtagcttcaatatccaaaccattcataggttcgtcgagaataaccagttgcggattatttaacaaagccaaagctattcctagtttttgcttcattccaactgagtagtcttttgcctttcgatcaatataatctttcatccctaatcgattaatcagtttatccataccacttaagtctttagcatagagctttaaattatcatatccagacagaaaaggataaataacaggcttttcaattaaagcaccaacagattgtagtgctaaatgatctttaagagtaatttcgtgatcattaaaactaattgaaccagtgaatttagttaatcctagcaaagttttcataatggtggttttgcctgctccgttatgaccaataagtcctacaatttcaccaggtgaaattgtaaaagatgcatctctaataatctctttgtgaccataaaaaatatttatattgttaacttttagcatgctatcctatctcctttaactccggattagacagagagttaaatcacttttctaattaaagtacctatattaaagtctagtatcctttcctgaattgtcaaattaagtgcaacagtgtaagtgtcaatgtttttgcggtagcctttaaaccattagtctaaccttaatttcttaaatatttatatgacttaaatttctgcttagcttgcttaaataactattgccagctacctgtgcggttaatgcgccatgctggatgcctaaatgaacttcatgacgcttctttaagctgtcacgggccgctgcttttaattcctgttcagtcaatacagttatttctgaatcttcaaactcgctgctaagccaaaattccagctctcgattcttgatgcagcttaagatcctaagcatgccttctgctccagattttgaccatttcttgccttgccccttaacacggtaggtatacttgcggtggttgctctcgcagcagccaatggctttagtcacagtcagttttcgtttcttaaacggcttaatatcgtcccaatgacgatcaatataattccttaggcgccccagataatcatgattgagctcggtattcaattcatcaattagtcggctttctgcagtggttaggatagttttaactttgtcatagctgtatttgtattccaaagcagaaatcagcttgccttgcaggtcaggcgcaaaatatagcctttctttgattttcttatttaggtgaaagacatccaagaaatgctcatgacgcttgcatagccctacaatgtcatcgaagtctgttttggcatatccagcaccgccatcggcgttgctaagaattacagtatcagaaagatcataagtattggccaggtactccttggcttcgttcagcgcatcaagtcggcttaaagaaacaaattccttggcattgattcgctttctgcgtttcttgcttatattgacaatgccttcacagacctgatagcgatgaaattccaaccggcttttagtgcctttgatcaccacgccatcgccttcaagatacaaaactgggacctttttcttagtgcctgcggcatcatatcttgaatctgcttcttggcccgctttaatatttttcccggccatttttaccaaattgcccacctgcatatggctaatattaaagccagacaggcaattgactgctagagcagtattgcgataagtggcaacgctgcttacttctaagatgtttttgactgctaaaatactgtagcgcttgtatttgtcaaagcccattaattcatccaagggataccttgcttgtttgcctgggcagacatatcttcttctgacatacctaacttcgccaaaagccatattgattgagcgctcattcttcttatcaatctgatagccctgtgctttaaccttggtaatcatttcatcatcaactttagctaaagccaaggccatgatttccttaatcaggtttaagaagaaacagattatttttctttcacgcttaatataattatcttcagactttataatatttgcgatttcagttacaattgaattcataaaagaccagcttctaatgtgttttttgttcttaacatcagactactggtctttttgtttgagctcaagtccaaattcaaaggacttgggcttttttaattatttattcaacttaccgtaaaaaattatacacttaggcaacagttaggctatgaagaaatatattgcttgaagagttcttctgctgtctgatattggaggattcggcgatatttgtggttaatggcattggttgcctgttgaacataagcttttgacttgtctttcatgctcttgcccttagggaagaattgacgcaaaagaccattgcagttctcatttgtgcctctttcccaaggagaatatggatgagcaaagtagatctgacatcctttgattttggtcatatccgcaaactcagaaccattgtcaaacgtaattgatttaaaccaattaggatgtctgtcaatctccttttgaagcagtctttgacaagtactggcccgatagtcaggaattttgataacaacctcaaaacgagtggttctttcagtcagtgtcattaaggcaggttgatttttacgtctgacgcctttaaccaaatcgccttcccagtgcagggaaacttttctgttttcaacttctttaggccgctgttcaatcgaattgccaagattctttttatgcggagcatggccaccatgactatgatggcgtttgtttctgcgtcttttaagcttcattggcaggtcgatattgcttatatccagcaatccttgatcaatataacgatagacagtgggcgtgctaggacatggataatttggcataatcctgtgaaattcaccaacgaattcatcaatgctagtggcatcaaatttggctttaaagcgtctgcttagcattctgaaaaagacggcatagtgttgcagtggattacgcttatagcagtttctgcggcgcttttcatgataaatttgtgcagtatcagcgtaatagtgctcatacaagacatagctgctgtctctttgcaggacactgcctcgtctaatttcacggctgatagttgatttatgacagcctacttcttgagcgatagcagtgcaggaggttatgccagaatcaagcagagcttgaatttgtccacgttgttcgctgttcaattgatgataatgcttggaaatgctagaatttgagttggtcatgaagatcttcctttcttgatttttggtcacttcaagtttaggtcttcatggcctttttgtttaacacttagtgttgcacttcaattttaaatccgggtctagtatccttttaataaatattttttactatgttcacatatgaacaataaatttaagattatctctaataaaaccgattttaggatttttttgaataaatttgctttatttgtttaaatgcagtttcaaaaccatcttttagagtattcaagccctgcagttctaaagcggcccacatcaaccgtaaattgcgatcatcatttgtttccaaaaaatttaacataaaatgcatgtatttgtatcttattttttcaaaagcaaacctgtctgtaatatctaagccagaaattattgcatctaatctttttgccttctttagatcttttttaataagaatacgcgtggtgctagttaaatcgttctagacaatatgccatattataagctaaaatagctatttctagccgttgttgaaaacctactaagctcctggctcgattattctcagcattgtaatagctaagcaaagaaaagtcgctttcgattgttcttctaattgccattaactgatgatcattatgctttttagcacccctcatgtttttacgatatggtgtccaaagcacgtatcccatacgctttagcttggctgctaagtcttttcctaaatagccttcatctcctaaaagataatggttaattggatgagcattgatcatcaattctaccgtctcttttgcatcatgtaccgacgccttagtaactgcgtagtcaagcagatagccatcatcactcactattgcgtggactttgaagccataatagtagatttttttcgtcgctttataaccaatatcggctatgccacggaagatcttaacgtgataattgcgaacaggctgacaaactggaatcggaaaactgtcgataatcaataattctccacctacctttacttcctgattccaaccctgacggatacaacgaattagaggcaagagcattcgagctcgacggttaaaacgagaatgagataagccaacgaagaatttacagaatcttcgttgagattcaattccaatttcagtttgccaaatgagcatcgctaagatagaactatcaggaagcttggtctgatcaacatttttacgatgtttaagtccatcaggcgcataaagcttatacagcgagcgacaaatcacatttaaccgattaaaactaacttgtaaatggtgagaaaaacgattaagcttgagatagttcaattagatcagactcttttctatttaaattacttacaacttgagtctagtctaattggacttttttattaactaaaacgatttaactagcaccacgcgtataagaatatattctgcattaatcaaagtatttaaaatagctgtagaaaatttcgaaactgtcaaatcttttgtgtaaatagatctttctcgtaaattgattttttaattatttatttaatcaaagtaggattctaaggtgtcctgaacctgaccaaagcctttatgaattcgattgaaataacggtcattgtagctcattgcctgaatgccaataaaagcatcaagcgactgttcagttggaaactctgccttaggcttagctttgcgcttgatcacattgttaaatgattcaatcatgttagtcgaataaattgaagctctgatctgcttgggatagttataaaagaccagcagatctggttctatgtctttcaagcttctgataacatggctgtaaaccttgccccatttggtatagaagtcatgcaggacagctgtggcttcttctttgtttgtctgttgatgcacctgtttgaattcgttcatgatcttttcacgatcgtcgacgcgtactttagcgcagatattgcgcatgacatgaaccaaacagcgttgaaaatgagctttaggataagtcctggccaaggctgttttcatgccaacaacaccatcagaaagaaaaagctcaacttgctttaagcctcgggatttcatgttttgaagcatatctgtccagacttcaatgttctcgctaggcgcaatgcagtagtcaatgacctccttgttgcccattaggcttgatgccaatggcaatatagactgcttcacgctcaaatgtttctcggcgcaaaggaaggtatgtcgcatccaaatagacgcagaaaaacttgtcgcttagcttgcgtttgtggtaagcctcaacctttggaatcatctgcttggaaatatttgatacctgagctggactgtaatggctgccatacatcttttcaattagatcggctatttccctggtggtcacgcccttggagtaaagcttgataatcatgctttccaagatatccgagtgctgcttgtagccaggcagcgtgtgctgatgaaattgaccgttgcgatcccgaggcacttgcacttcaattgggccaaattgcgtatcaactttgcggaaataagcaccatttctagagttgccagtattccagccatttctggcatagggatcatagcccagaaaggcagtcaattcagcttctaacaagttattaacagcctgttgtagctctttgcgcaataaatcatttattttgtctggattgaatagagcttgagcaaaatctttggtaaaatcattcatgaaggagttcttctttctgtatgtgtttttttgttcaaaccaatcatacgagaaaggaactcctttttctaatgtttaaagaaataaatttaaggaatcattcatccttacacaaactattttacagtctcaaaatttcatttccaaatcgttattatttttaaaatagaaaactagtgaaaaagataaactataaatagttcttgggctaataagattctgagtattaccaaagaagtacacatcatcgtaataccaaacttcatctccagataaaatttttgaaaagtacatcgataatctctttttatagttatctgtaaaaatatccactcctgtaagatcgtaataagcattacaataaatggctgcttttaaaaaagttcgtttatcgaaactgtcattttcaacttctgataacaattttttagattgcgtttttaagtaattaatatcattactttcatatgcttttgaaacttctaaagttatattttttagataattcgaaatattattattaaagaaatctattttttggacatgaattacttcgagtagtttgaatactttttcaatatctaaacctgcttcgcctctttcccatctttctaattttgaacgagaaatacctactgcttccgcagctttactacttgaaattttggttgcctttcttaattttctaaattttctaccatatgtttctttcataacccactcctagttacgttcacaaataccttcaaaataatgatccagataaaggactagttttacctccttaatgatgccttaatgcaataaaaaatcaaactcataaatattacctaaattttcatttagagctactaaaaaagcctaataccatcatcaagggtattaggtctttattacctaggaaatactaacgtacagtttccaaacaatatgattttttatgacagtttgggcaacgcaattttctagtatgtggcgtgtgtgccgcaaacataaagcttttaagttctggaacaaatttgtaatcgcaattaggacaaatatatgccactttttgataataatttttaagtaacacgaatgacattgcaatcaagcttactactaaaatagctaccgaaatataggctgcagtgttcatcttattgatgatacagtacgcaataaatgccataccgaccaattcaacagtgatttctactgctgacaatttccacattgaacgtgttacctctttgtatctagtttcattattcatgattttcgtaatgtcagtaacttccgcaatattattgggtttacttagaaccttttgtagttggataattttcttgttttgctcttctaatttttgcgtttctgctttatttctttttagttgatcttcaagcaaaagatcgattaatttatcaccatttttatcttctagtattttttgaatatcctttaacgaaaagccaagctcctttaaaaagatgattaattttaattgttttacctgctcatcagaatataaacgatagccactttcactaactcgactgggtttgaccaaacctttttgatcatagtaacgaatggttctagtggttatgtttaacttctttgctagatctccgattgtgtattctgacattactttctcacctcacaacttaaatatacgggtttacgctacgtcagagtcaagaataagctaaattttccgtaaaaaacttcaaaaagcaaatattttgctcttttcctattgaaattattaacattaactgtataattttaagtgaatgttcactttatacaaatttcggaggactaaatgaacgcaatcagtaatttctttcatttaaaggagaacaatacctcctttaagaccgagcttttagccggtttgactacttttgtaagtatgtcatacattctgttcgttaacccaaacgtcctaggtgccagcggtatggataaaggtgctctattcaccgttactgcattgtcggctgcctttacctgtatcgtaatggggcttatcgctaactacccaattgcttccgcaccaactttgggcttaaacgccttctttacctatactgtttgtttaggcatgaaggttaagtggcaaactgctttagcagctgttttcgttgcatcaattctgttcattttgttaactgtctttaaggtacgtgaaatgatcattgatgccatccctgccgatattaaatatgctatttccgcaggtatcggcttattcatcgcctttatcggtttgcaaggtggtaagttgattcaaaacagtgattctaccttagttactattggtagtctcaacaaccctactgtttggatcactatctttggtttaatcattactattttcttaatgattgccagagttccaggtgccatcttcatcggaatgatcgccgctgctgtttttggcatagtgactggtcaaattcccatgcctaaaggcgttatctcttcagttccaagcattgctccaacttttggtcaagcagtcttccatattggcgatattaataccgttcaaatgtggatcgttgtctttacattcttacttgttactttctttgataccactggtaccttaattggtttggttcaacaagcaggtctgatgaaggacaacaagatgccacgtgctggtgaagctctagcagctgattccagtggtatgttggtcggttctgttcttggtacctcacctgtcggtgcctttgttgaatcaagtgccgggatcgctgttggtgggcgtaccggtttaactgccgtttgggttggtattttcttccttatttcaactatcttcagtccaattttgagtgttttcactacccaagttacggcaccagctttaattattgttggagtattaatggccgaaaacttggcacacgttcactggactaatcttgaaattgccatcccatgtttcttaatcgcattgggaatgcctcttacatactctatttcagacggacttggctggggtttgattgtctaccctgtatcaatgatcgcagccaagcgtttcaaagaaatcacgccaatgatgtggattttgtttattgttttcgtaatctacttcgttgttttaaatgtaaaataattctatcttataacccccttatcttacttttacattaatatataccctcatctaaccaagtagcatgtctacttggtttttatgctaaaaagatgtctgttaatagtatggatgatgacagcagattctattagatgatataataatcaaagaaaggctgtgactaaaatgaaatcatataaaaaaattcaagctaatgttgactcctcactagcacttcaagcagaaggaatttttcaagatatagggctcaataccactaccgcaataaatgtgttcttaaagaaagttgtggcaactggtggtatcccatttgaattaaaagaaactcctgaacaaaaagcctcaagagaattaattcaaagcatctcaaaaattccccacaaagaagctaaaaccaaaaaggaaattgaggattggctagatgaggactaatgatattgtagatatttatgttgcttacattgataagcctggaggaaaaaataggcctgtattaataattaaattactaaacagtaaagcttggctgctaaaaatcacttcaaaatataaagaaaaaagtgaaaatatccgaaagcattactttcccatttttgactggaaaaaatataatttagataaaccatcatacattgatactaaaaattatttaatagttactattagtgatttaaatatcgaaaaataccgaggccatttctcaatagcagatttacgcaaattaaaagattttattgacgaaaatccaaactaagaattaaactatatgttttagttcctaaacacaatctcaaatatgagattgtgtttttatttatccaaatggcatcttttgataatcatttgacgccttatgatgttcggattcttctaaattgccgctatactattttcaacaaatcgagttatgaaagatttatttaggaggaattcattatgacaactcaagaaggaaaaactgctttaattactggttcatacggtgggcttggtacccaattcgttaacattcatgcttcacacgggggtgacctaatcctagttggtcgcaatgctaagaaattagccgatcaacaaaaagaagcccgtagaaagtacaacgtaacggcgcatattatcgatgttgatctctcacaaccagatgctgcgcaaaagatctatgatacttgcaaaaagaacggttggactattgactacttaatcaacaatgctggctttggtggtcaaggcgaattcattaaaagaagtatggaacaagacatgtccatgatcgccgttaacattgaaacgcctactcgtttaactaaattatttttacctgacttcgtaaaacgcggccgttatgcctggcccacttcaagccgtttactacgctactaaagcatacgttacaagctggtcaaatgcgttatggcgtgaagtacaaggcacaggcgttacggtaagctgcttaatgcctagcgctatgcaaaccggttttatcagtcgtggtgatttgagttcaactcaattattcgcccatgcggttagtccataaggtgttgcaaaagctgggtatgaagaaatgattgaaggcaagcttaacattaccgctggtttaactgcagcccaaaaaccattcatgaaattggaaccaatgttacctaagaagatgctcatgaacaatgtttataagatgcaagaacaaggtagtagaaagtaatcaacttatcttataatatggatcaaaaggatggtatttgaatgaatcactttattttagatggtcgctatgaagacctactctcttttaacgttgaagaagcacttaaaaaagccaatattcctgaagattgtttcaaaaaactccatccttcaatgtgtgaacaacaatactacaattttatggcggctattggtgatcagattagtgatccattcactccaattgaaattgcaactacaaatccaattgaatctttctctccaccaatttttgcggcatatagtagccgtaacggagatatttttatcaagcgtctagccaaatataaaaagctgattggcccattatcttttaaaattgatgaggatagcaagcagctctctattaccctaactccaagtaatcagcaatattccctaccctcttttctagttttatcagaatttgcatttttagtgggacttttgcgcaagacgaccaaagaagctatttccccgctgaagatcacaatgacatcccccgtcaatgatgagcaggtcattaacttctttggctgcaaaatcgaatcgggtaaacgcaacaccatcacttttgccaaaaaagacttgcaggtcaattttattagttataactaagcaatgtgggattatttcaagcctgaattaactaaacgcttatctgaattatccgttgatgattcaactagtgctagagtacgtagcatattgaccgaattacttcctaatggtgaatttacaattgacgatgtagctaaaaagttaggttattctaaacagactttacagagaaagttgagtagcgaaaacactacttttcaaaaacaactgaactccacccgagaagttttagcgctaaattatttacaaaacaccgatatgacaactagcgatattgcttaccttctaggctatcaggaatttaattcgttcttacgtgccttcagcatctggaaaggcataagcattagcgaatatcgtgaaaaaatgaataaataataaaaagcagatatattttctgtttttttactttataaaggaaataatatgagatttttgctataatttactttataaaggaaataatatgaaaattgctaaaaatttactttatgaaggaaataatatgcagttaaatttaattaaccgcccacagtatttaaatcaattacttcaatttcaaaatacagaattcatcaaagtactgacgggagtatgaagatcaggcaaatcttatattttaatgctttatcgtgaatatttactcaaacacaacataaatgaacatcaaatcatttatatttcttttgaagactttgataatatagatctttatgaacctaaaaagctttattcatacttaaaagaacgaattattagtgaccaaagaatgtacattctacttgatgaaatccaatatgtatcagattggcaaaaagtagtaaatagccttcgacttaatcctctacttgatatcacaattactggcagtaattccaatctattaagtggagaattagcaaccttactatcaggaagatatgtagaaatacatgtttatcctctttcttttaaagaaatgctagattttaaacatatttctgaaccatcagagcgtcagattgataacttatatgatgaatacattaaatatggtggtttccccgcggtagtgttagcaaaagaagaattaaaacaaactattctttctggaatttacaataccattattgtcaatgatatcggctacaaaaatggattaagagaaccagaattagttgcattagtagctaaatatctagcagattcgattggtcaattaattaatccgaacaagattgtaaatacactaaaatcagcaaattttgatatctcttataacgctgtgcagcgttaccttaaatattttgaagaagcatatcttttttataaatctagtcgttatgatattagagggagaaagattctttctactcaaggtaaggattacattgtagatactggtttgcgtacccaagctttaggagaaagaaataatgaccgcggtagtgttttagaaaatatagtttatgtcgaattacttcgccggggctacacagttcaaattggtaaattagataataaagaaattgatttcatcgttttcaaggtaaatgataaacaatatattcaagtaacctaccagcttccagaaaattctactagagaaactgataatttacttcaaattccaaataactacaaaaaaatagtcatcactggccgatatgaaaatgaagaaatgatttccggtattccaataatcaatattaaagattggttattaagctctaaaaactgatcaaaataggatcgactaactcatgtcgatcctatttttaaattaaattatgttttttacaataagtaaaaattccgtcatcttgcacgctgccacaggtgtcatcagcaatttccttcacatcgtctgttgcgttccccattgcaacgccgtgaccaacagtctttaacatttcaatatcgttgccgccatcaccaaaggctattgcttcgctcacagggatttgataataatctaacactttttcaattgctacacccttactaccagtagctggaataatatctgctgctctatcccaccaagctgttaccttagcattttgcgtattagctacaagtccgtcataatctttttcacgacagcctaccattatttgataaaccgtatcctgatcgacaaccacatcaaaatctggcgccactctcaaatccgttccaccaatagcaaagtattcctttaaatcctcatcaacaccattagctgcaatccgtgttttggtagctacagctaacggccgatttattttctgagcattttgaatcatatgcaagacatctccttgccttaacggattatcaaaaacaatgtcttgatcgttatagcagtaagaaccattaaaagttaaatatgcatcaaaatctacacccaacttaggcagttgcactggtggtctgcctgatgcaatacaaatcataatgccgttgtcttgtaaagcatgcagtgtctctagcattttaggtgtaattgattttttcttttcaattaaagtaccatctatatcaaaaaatattatcttaggtttgctcattatttttaccttctaaagaattttctactaattattatactttaaccgatatttcccaggaaatattaaaattgagctctcttcctcaacatctgtgctaaactagatacaattagtttctttaaaagttaatagttacggaggaatttttaaatgcagacattggaaaaagtctttcatttacaagatgctcataccactgttaaacgtgagttaatcgctgctttaaccacttttgtcagtctctcctacatcttattcgttaacccaaacattttgcacgcagctggtatccctaaaggtgccgcttttactgtaacagctcttgccacagcagttgggtgttttttaatgggttttattgctaattatccgattgccttagctccaaccttaggtagcggtgcctttttcgcttataacgtatgtgttgggatgcatatttcttgggaaacagctttggctgcagtccttgttgcttcagttttattcattttaattactgtctttaaattacgcgaattagtggttaatgccattccacaagatatgaagtatgctatttcagcaggaattgggttattcatcgcttttattggcttaaaaaatggtcaattaattgttaacagcgattcaactttagttactctgggaaaatttagtactccagcagtttggatcacattatttggcttaattttgactgttgtattaatggcattaaacgtgcctggttctatctttattggaatgattgttactgccatcttcggtatgatcattggtcaaattccattaccacataacatcgtttctggtgccccaagtattgcaccaaccttcggccaagcggtttttcacattaaagatattaatacagctcaactttggatggttgtactaactttcttattagttaccttctttgatactgctggtactttaattggaatgactgaacaagccggtatggttgacaaggatggcaagattccacggatcggtcgtgcttttttggctgattcaactgctatggttgaaggtgcagtctttggtactgctccacttggaacttctgttgaatcaagtgccggaattgccatgggtggtcgtactggtttgactgctatctttgttggtattttcttcattatcagtatgattttcagcccattgttacaagtaattccaactactgtaacggctcctgctttaattatcgttggtgtactgatggccagcaacttaaagaaaatcgattgggaaaagttcgaaattgcctttcctgcttttcttaccgttgtagggatgccactgacttactcaatttcagatggtttggcattaggcttgattgcctacccaattaccatgattgcttctaagcgttataaggaagttagtcctatgatgtatatcctgttcgtagtatttatcatctttttcttagttacgaatttataaaaagaatgctaaagataagcagtttgaagctgcttattttttattgacttgatttttattttgtactactgtaataaatatataagacagtttttatgggagaagaaaaatgagactgtaaaatagtttgtgtaaggatgaatgattccttaaatttatttctttaaacattagaaaaaggagttcctttctcgtatgattggtttgaacaaaaaacacatacagaaagaagaactccttcatgaatgattttaccaaaaatatggctcaagcactattcgatcaagacaaagttaatgattttttgcgcaaggaaattcaaactgcagttaatcaattgcttaaagttgaattgactgcctttctgggctatgatccctatgccagaaatggctggaatactggcaactctagaaatggtgcttatttccgcaaagttgatacgcaatttggcccaattgaagtgcaagtgcctcgggatcgcaacggtcaatttcatcagcacacgctgcctgactacaagcagcactcggatatcttggaaagcatgattatcaagctttactccaagggcgtgaccaccagggaaatagccgatctaattgaaaagatgtatggcagccattatagtccagctcaggtatcaaatatttccaagcagatgctccccaaggttgaggcttatcacaagcgcaagctaagcgacaagtttttctgtgtctatttggatgcgacataccttcctttgcgccgagaaacgtttgagcgtgaagcagtatatattgccattggcattaaacctaatggacataaggaagtcattgactactgcattgctcctagtgagaacattgaagtctggacagatatgcttcaaaacatgaaggccagaggcttgaagcaagttgaactctttctttctgatggtgttgttggcatgaaaacagccttggccaggacttatcctaaagctcattttcaacgctgtttggttcatgtcatgcgcaatatctgcgctaaagtacgcgtcgacgatcgtgaaaagatcatgaacgaattcaaacaggtgcatcaacagacaaacaaagaagaagccacagctgtcctgcatgacttctataccaaatggggcaaggtttacagccatgttatcagaagcttgaaagacatagaaccagatctgctggtcttttataactatcccaagcagatcagagcttcaatttattcgactaacatgattgaatcatttaacaatgtgatcaagcgcaaagctaagcctaaagcagagttcccaaatgaacagttgcttgatacttttattggcattcaagcaatgagctacaacgaacgctatttcaatcgaatccacaaaggctttggtcaggttcaggataccttagaatcctactttgattaaataaaagattaaaaaatcaatttacgagaaagaactatttacacaaaagatttgacagtttcagaaaaatgaaaatcaaaaaagtactactgaccacgtctttactcacgattagtttgattactctatcgggatgtagtttccacctgtttaccaacaagaattccggtcctacaatcaaacgaactttgtcctctaagaaattcaattcacttaaggtagccagtgacattactgatgttgaattacatgcaagtaatcaatacaaagttatctatcatgggctcaagcgtttcaaacctagcgttaatgtgaaaaatggtcagttaaagatcactcaaactagtaatggtgtttcttataacatcaaagaaggcaatacagtggcaatctacctacctgccaaagaattacaaaatatcaatattaatctttctgatggcgatatcgatgctgatggcaaggttcaagcaaaaaatgtcaaacttcacagtgacgatggtgatgtcaactttgacgatttaagaattagctctggcaaaattacctcagatgacggcgatatttcagtttctaatctacttactagaaaaggcgccacagttgaatcagatgatggtgacattcgtattagaaagagcaatgccagtggttaccgcctaacttctgacgacggtgacgtcacattcaagggagatacttctgataatgatgacggtggttcttactacaaaaatactaagagttctaacctgctctctgctcacagtgatgacggcgacgtcaacgttaactaaatttcgtcataaggcgataagtttcacatgaaacaaaaaatcaatgcatcattgataatgcattgattttttacttttttcctcattcatagcataaacacgactttacaagattatttaagtttctattgaaatagacataattttaatacgaaaaagataagactaaattctacttttccattaaaaaatatttaccaattttccattttctaagtcaaaatgatgcgtaaatttcttcatcgtcgttgatgaaatatggtggtcaatttcaattactgttaatggtgaattcaaaaagacattatgaatttgctcagcagtttgcggatcaagtgaagcagttccttcatcaactactaaaatttctctttggaagagaaaagcacgcgctaattcaattctctttctttccccacctgaaagattatgcccattttcttcaattacggtatctaagccatgtttttgaaggtaattagttaatcctgcttgttgagccgcagccacgatttgcttttgatcaaattgtttaccaagagttaaattaaagcgtaaagtcacattaaaaatttgcgaagattgttgaacttcactaaaaatttgcgtttcaacagcctgatcattaaccaaaactcttcccttctgcggagataatttacccattaacaccttaagtaaagtagatttaccttcaccagactttccggttaacagaattttatctcctttattaacacataaactcacattattaagcactggactatcagcttgatagccgaaagttacattgtacatatttaattgcttaaatttgactggagcttcatcttgcttagtcgttaaaggcttgaaagataacaacttagcggtcattggtttagtagcagcaatctgattacgaatactattaatactaaagaaactatttacaatccaagcgctagagtattgaacggcaacaaaagaagccaaagcaatgtgtccttgaattaccataataatgccgattccaattggtaagaagtctagtgagtaagctaataaatcaacgtaaaaatcacttttagcaattgtatcgtcacgttcacgtttattctcaacagaatttttaattactttactacccttctttacaaatagagataatacattgtaatttaaaaccgtattgatatttttgagtaaatccgacataaacgttacataactacctgttgatttactccaattggatgactgattggctgttttcttgctaaacaaactaggaataaggcttgaaagactggcaaaagcaacaaagactaatgtcaggactacactatttatcagcgcaatagtaacgataccaacaattttaaccacagtagatactagtgaaaataactgtctaaagtacttttcttcaatcaggttaagatcattattaatgaaagaaattcgattagaaatttctttttctcctgtttttacaaaatccgtctgcatcagatactcacgaacttcttgattaaatagtgctacattacgattaattactcgattatttaagtattctacaattacaagtaagatttgcaatactgtaattacgataatcattctcaccgtatttggaatacttttacctgtaattaacgcaaaaatttcggagtatgaccatgtgctaaaagacaaagataatccgcttaaacatgacagaataatactgagcgaaaaccatttgaggtcaataaactttttcataaatgaatctccctttcaattaagttggattcattatctgctttagttcacgataaaaatagctttctgcaaaagtgatcttcaatctgcatatatgcagattattctggaagaatagacagaatattttctaaattacttgccttgatcaatttcttaatagctaatacctgctctgtatctccagcaaaatagcattgataaaaatgaccaatgattttatataagactaaagatggcgtttgacttaattgcccaagtaaataaataggctctttattatcttttacaaatttattttcagcacaagtatataaataattcacacaaatagtggcaattgttgtttgcattttttctgtctgctcagacattttatcattataagtagtgagaattttttgaaagaaaaaagcaaaatcgtcatgagtaaagatagaggtaccaaaattggctaacaaatctaaactaaatttatcttgaagccaattgtcgcctgcaaacaagcgttgcagtactatatttttatctttgacatcaaatttacgttttccttctagcaaggtaagaatcaacttagctttgattttcagaagatcatgatgaggcagttgttgaatttctgttaccaattttctaacttggttaaagtcttgattataataagcagtctgtaattgatcacctaaattgttttcatcgtcagcttgtgcgactgaattttgcttaaagaattcatcaaatgaaattttatttttctgcaaaattgccattaagtccttagctgatatttcatgcaatccgcgctcaatcttagaataatgggcaggtgataaaattcctgctacaaattgttcttgcgtcagtccccgcgattggcgcgctttttttaatgctgtgttaatttccatagctgtttttatttcaatttacggtcccttttagatacaaaccaaattgtcccatcagaagttgcccagtgtccatcagaagttttatgaaatttcagcgtcagtttcttactgtgtagtgtccagctatttttaccttccattgtgacacggacccggcctaatttttctgaatttattttgttattgtagtctttgggatcatatgaattatgcccatatactttataaattgcttttgctgccgcagtatttggcttaatgtatttataagtaccagatgcatcagtcttaaaaactgggctggatgcatcgatttgaccactatttttccccagagctatgttcaccaacatgccaagatgattttccattacagaatctgtttgatggggatcataggttgtaagatttttattagcaaactgttctggaatagtttgctgattgcgataaaacaaccagccaccgactgccagaactacgactactacaacagttatgattgtagctttctttttcataaaggatcacctgttatctatcagcttttttctgaaaagtaattaatccgtgtgaaactaatctaacagttccgccataataaactacccaacgtactttgccattactgtactcttcatacattctctcccgctgaagatatccattatatgtaccatcattataaggaatttccatcggagtatctacagcaccatcataagcgccataacgcgtcttatgccatgggcctgttctcttaactccatgaacttttttagttaacggtagtttttgaacgttttaaactgaatctgtactagattccgcagcagatacaacagcagtattagtggttgcaaacagagcagttgctgagaataacactaaagttgcttttcttaatttcatatctaacaccttatacctttcttttattgtttattttcattacctagttgttcattatcattgacaacaaaatttgtcatcattttctttttacttgctaatgtaggaattgggtagcttttaagtttagtattatacaaatagccaccgtacataattcctgttggattatgccccattggaacagtgtacatcttttccagatatcctctaaatacctcattgcctcttcttacagtgtaataaacataagtaccctgatcatgatagtattgacgttgataccagatatgttcaacaaatccttttgattcagtgctttgtgttgcagcttgtacatggtttgattgaaccaaagctgaagttgaaactgatactagtgataaagctaatgctgctttagctgttaaagttaaaattttcttatttcttttcataactttaacctactctttttttcttttcttgctttaattactacctaatccagacggaataggaacccatggacccatatttttctctcctttcttatttatttttcattaattttactttcactactaagaactgttcagaaattgtcaaagatgacaattttctacaataaaattcttaatcaaatgagacattccattacttttcataaattcaataatctgatctacttcttcatttttgccatcaaaacaataatggtaataattggcaactattttagcaaaagcattacgtggaatttctggcaatttagaaatgaaatcgtaaattagatttaaatcaattttccttctttgtacgtatacattagccaaataattaatagctattgctgacattatttcttgtagttgaccagacagattagatacattatggcgatacgttctaaatattgaattaatcaaaaagtccatatcttctggggcatatatcatcatagtcattgcaaaaatttgtagagtagattcactccactcatcagaatcaaagacaatttgtctaacttgtcgtttaatattctcagatatttgatcaatttgtttctttaaagatgctattgaaaataccactaaagcataaagattaaatatattctgactttgatttttatattttccaatttcaattttcaaatcttcaagtcgttcgatctgctgatgataatatgcatcttctaattgcttttgccagatcaaatttttgtgagcaagatcattttcactatcttcattttctattcgctctaaaaatatagaagcttgcaatccatgttgctttaacaaatcaattaaatcctgagtctgaatatcatttaatccacgttcaatttttgaatagtaagatgttgataacacatcccccgccatttcagtttgtgataatttcatactttttcttgtttgttttaatgcttcaccaattgtcatatctttccctccctcgtattatcatatttttcattattgtataatgttttgttaattttgcaatagtttgtaaaacaaaagcattatttttatttttcaatcttttatgtttacaaatgtaaacttagcgagtagaataaaaaatgtgaagagatgaaaataaattatttaatttggaggttacggtcatggatgtaactaaaatcattatccttgttgtcgcaatcgccttgatcggctttatcctttggtggttcttcggcaaacatgacgaagctatcggtaaagcaagtgttaatcaaggcacacaagaagctaacatcgtcgttaacggcggttactctccttctaccattgttttaaaacaaggcgtaccagctaaggtgaattttgatatgcaagactctaccgcctgtttatctcatgtcgtctttgaacaacttggcgttgacaaagatttaactaagcaaaaagttactacagttgatattccgactgataagaaaggtacatataattttgcctgcgggatggatatgttccacggtaaagtcattgttaaataaggagtttacaaaatgagtattttttcaaagaatcaaactaaaaaagttgttgttaatgcagaaaatcatggttataaaccaaacacagttactttcaagcaaggtaaaccagctcaattaaagtttattccatcagataatatgggctgcatgaatgaagtagtctctaaagatttaaattttgaccaaaaattagatggtaaaaaagaagttacgattgacattccaactgacaagccaggtacttacacctacgcttgtggaatggatatgttccgcggaaaggttgttgttaaataatgaaactttcaaacattaagcgcttctggatctcatttattctagctattccaatgctaatccagatgttcgccatgccctttcactggatgatgccaggctataattggatcgcttttatcacgactacaatcattatggcgatttccgctgccccttactggagcagtgcttgggccgcttttaaacaccataacgctaatatgaacacattagtagccgtcggtacttctgtagcttacttttacagtatctttgctatgtttactggacgtgaagtctactttgaaagtgctgctttcgtcaccgtcttcgttttgctcggggatgcaatggaagaaaagatgcacaataatgcctcgaatgctttagctaaactaattgatctgcaagctaaagatgctgaagttgaacgtgatggcaaattcattaagttgccactagatcaagttaaagttggtgacatcattcgcgttaagcctggtgaaaaagtccctgtagatggcgtgattgttgacggttcatcgactcttgatgaatcaatggttacgggtgaaagtatgccagttactaagaaaaaaggcgacgatgttgttggctcaaccatcaatactaatgggacttttaccttcaaagcaactaaggtcggtagtgacacgatgctttcgcagattgttgatttagttaaaaaagctcaaaccagccatgcgccgattcaaaacctaactgataaaatatctaatatctttgtcccagtcgttttaattattgcaattattaccttcgtaatttggtatgttttcttaggcgcaacattggttaatgctatgctcttcgccgtttcagtagtcgtaattgcttgtccatgtgcactaggtttagcgacaccaactgctttaatggttggtactgcccgtagcgctaaaatgggcgttttaatcaagaacggtgaagttcttgaagaagttagcgacattgataccgttgtgtttgataagactggtacaattaccgttggtaagccacaagttactaatgttgtaggtgataaaaacaaggtcttaactattgcagctagtttggaagaaaattctgagcacccactagcaaccgctgtagttaaagctgctaaagaagcaaagactgaaattaagtctatacaaaactttgcagctattgaaggccgcggagttaaggcaaactatggcaatcaagaagcttttgttggtagcgatcgtttattagaagatatttctatttcccaggaaatgaaagatcaggctctccaacttcaaaaagaagcaaaaactgtagtctatgttggcctaggtaatgacatcattggcttaattgccattcaagatgtacctaaagcaagttctaagcaagcaattgcggaacttaaaaagcgtggtttaaagacggtgatgcttaccggtgacaatcaaaatgttgctgaagctattggccgtgaagtcggaatcgaccaagtaatcgccggtgttttaccaactgaaaaagccgctgagattaagaaattgcaggatgaaggcaataaagtagcctttgttggtgatggtattaacgacgcacctgcactgtctacagctgatgtcggcatcgccatgggatcaggtaccgatattgctattgaatctggtggcattgttctcgttcaaaatgacttaatgggcgtagttagagcgcttgagatctctaagaagactttcaacagaatcaaattaaacctcttctgggctcttatttacaacactattggtattccaattgcagcaggtttattcatggcctttggtctgcagcttagtcctgaacttgcaggtttagctatggccttctcttctgtttctgttgtaactagttcacttttattgaataaaacaaaaattgctggtgaaacagctcaagtttcaaagtaaaataattctccgaccggatattttaatccggttttctttttgtaaatttttcaatttgcgacttaaagtttcagcagtaatacccaaatatgatgctaagtctttcttttttaactttaattccacatttttactcccctgtttttgagctaagtcttgcaaataggccattaagcgttcctgagcatccattgaattgcgccgaatagagttagtttcgattgtaaccagctgctcgccaaaattattaagcaaattcaatgctaaatctggcgtctttttcaataacttttgaaaatcacgacgctcaatagaacaaacataagtatcttgtaaagcctgcacaaagttttcctgggcatgttcttgaaaaagattctgctgtccattagcatcgccttgattcagcacacctaatacggtctctttaccgtcttcgttgagattgtaaatcttggcactgccttgatccataaaaagcattccgttcttaccatcacctggttgtcgaataatactgccttttggaaaatattcttggtgcgttgaaattggtactagtttttctaacatttcatttggcaaatttttaaatatggctgctttgcgaatacaagccatgggtgaatgttgcataaaagcctcatttcttgatctaagtcaatttatttttatctgcatcttaatacaatgtatttaacaactcaagcagaaaggaaatattaatcatgactaaatacatcgcacatattgagcctttaaacgctaaaaaaattggtaccaaggcacacggtactgccacttttgaaaaaaaaggtgatcaactacatattcacgttgagatgtttgatactccagcaaatattgaacactgggaacatttccatggcttcccgaatggtcaaaaagctcatgtaccaactgcagctcaagacgttaaccatgatggctttattgatttaccagaaactgagccggtctcaggaactacaatggtgccacttgatgatgccccagaaaacatgaatattcctcatgatggttatcctgttgccgacagtaatggacattatgaatatgagattgatgtctcattaacaaagctacaaaagaaattcaaagctgcctttggtagcgataaactacaactagacaagcgtgtagtttacgttcatggtgtacctgcagatctggaattacctgatactgtaggtggttgcgtaatgagttatgatgcccatactaccttgccaatcgcagctggtgaaattgaaaaagcttaagttaaaagccattccttgtgaatggctttttgcatcctttcttattttttgatagcatagatatagattatgtaaaatatctaagaaaaggagatgttttataagtaggcttagaccctactcttatggagaataacgaaaaaattatccaagaaaagaaacgcgaaaaatttattaaaactaaaaagaattacaagcgtgcaccactaatgtcagttcacttaagagtgatgatggccgttatcttaggtcaaatcgcctgtggctattccctgggaattagtggtaccgctctttctaatgcagctaaatatatcaacattagtgacttctggactggattaattggggctggtgctttaattggccttgctggtagtcttttggtcggtcgactttcggataaaatcggtcgccgtaaactcttaatgtggaatatgtatatattagctgcttttttctacccaaagtcaagtattatcaatgatttaagaaaataaatttacttgttttaatgatgcgaataaggttaaagcaaataagagtttaaatttaagaaaaagcgaaagtaccacaaataagcctatgaatacttgtagtttttccataggttgcttatacttaagttgattatttgatttcagctaaagtcttttattttcggtggctatgttgtaatcatataattgatcatgtttgataagagcaaacattgtgcgtatcagtttatggactgatgcaatggcgattttcttatagccttgtctatttgaagatcgttttttcttgtcataataatcagttatatggcaaggctgcgtagcctttaccgtctccatttgagtaataactcgataaagtatttttctggcaatatgattgccatgcttggtaatgccaagagaactgtctttttcaccagattggtaccttcctggatcaatgccaacaaacgcatcaatttgagctgaagtgctaaaccgtcttagatcaccgagctctgctactaatctcactgctgtaattctagcaacccctgggatactcaaatagatggataaagcacgagcgtttactgctttagccagcttttccatgtagttaattacatagtcgcgttcttgctggagtgaaaataaattagaaatgttcctttgaatagctctaacgataatactatctttggaatcataaggataagcttctctagcaaaagcgtataatcttgtggttaagtaccgtgccctttgttgtcctattccagaaatagaattaagcatttgagttacctgtgtctcattcttttctagaacatatccagcatgtgggaaaagactaacaagcgcccaataaattctgccagatggatgagacagtatttcttcaatttgtgggaaagtggattggaggttgcggtgcaattgatttttagtagtaactatactcctagtaagttcttcataatagcgactggcattctgaagttcatgatactctctgggctgtggatcacgcagcttttgcggggcattaaattgaattaaagccaggcgataagcatctaccttatcagttttattatggcgtaaattattgtccattagctttttcgctttaagcggattaagcttcaaatacttaatatgataatcctctaagaaagcttgcaggcttagagaataaacaccagtagcttcgaaaacaactaaaggagttatcaaatattggttcagttgctcataaagtttttgatagccaaaggaatcattagagattctaaaagattcgccttgtttgatccggtcattaaccacacaaactgtggaagatttactgctaacatcaataccgaaaataatttgtgattccataatataacctccgctgtgaagataaacctctttatcaacctattaattctaattttctaaacacggcatctaagtgcccacagacttcgaagagacttaagaataggtggtaaagcagtccgtttcttttacgacatcaagtgtctaaaaagctgaagacttgatttgctttatcttcactttctattttagacaaaataaaaagtgccagatcgtgaatccgtcgattcatgatccaacactaggttagtatgtttctttattacatctaataaccgctaattttagcttaacctttatcctccgtattggaattggtttaatgattgctgttgactatactgtagggaatgccttgttaaccgaatggctacctaagggcgaagacagcaaacgccagagtcatttattaatctattggacaattggttttattttgtcatatctagctggtagttttatcactggatttgatagttatacttggcaaataatcttagcaacaagtgcagtacctgcactagtaactgctatcttcagaagtcttttcccactccctgcttcaccaggctggctagcaagtaagggtaagattaagacggccaacaaggtcattcgtaagcacatgggacgcaaatggagattacctgcccgctttatgaagcggaataaaaagaaaacgcctagaaatatttcctgggcaattttattttccaagcaatatctgcgacgtactctagtaggtgggattttctatgcctgccaagccttctcatttttcggtattagtatcttcttgccaattttattacaaagcatgaatatcactagtggaaatatctcaggaattatctacaatggtgggatgttcattggtgtgctaatcggtacctggatctttaacaaggttagccgccgcttctatcttatcagtaattttctaatctcaggtctgctaatcggcattttagcaatagtacctaacttaaattcaatacttaaattaggtatttttacgttatttgcgattattttatcagctggtttgatcctagattatccttatccgactgaattatttgatctgaaggtacgagcaactggtgtaggtacttgtattacaatcagccgaatcggggctgccgcagggactttcttattgcccgtcttaactaatgtgggtggtgctagcctggcaatgctagtttgtgcgattgttttactctttgcctttatcgtttgcctcatctgggcaccagagacctcaccccaatttatgaaaaaataaaataattaatatgctacacaaaaagacagattacatatgatgcaatctgtcttttcttatttcttatcttttttcttcttgtccttagaatccttatttaataattcttctggatccttatgcttaggcgtcttctttggatctggtacagttgcaaagcgatcaagcatcttctgtaagttattagggttgtcaaaagttaatcccataaaacatcttcctttcgttttctcaattatattaaaatttcaattcaaatgacaataattttaaccctcattatcaataaattgttgcatcttaatcatttctgaaccagccagatcaacactaattaaatcactataatcatgaacactagtatctcctaaaccatattcagttacaatttttaggtcgaagccactatcagagcgatcttcaattaagcctaaacgatcaggataatgataaattgaatcactaattttcactatttgatcttcgggccaattatcaataatttctgctggtgactgaatttcatcccgtaatttaactgaacgctccagcctgtccggatcaaaactaccattatttttttgccattgaactaaaaaattaaagaagagcaagcgctcggaatcttcagtaatatgcgttatatggctcctagcaatcactgcaattgattcaacctgccctaactcattgatgctctcgaataccagattatcatcgtcatacttgagtactttaccaatagcaaaactaccatattgatcatcaaaggtataatcaaaataaatttcaaccagatccaagtcgttagtgaattcttgcttctgtgattgccgcaaatattgggtaaataagcgattatcaatggcattagtatcgacacaaacaatatcgtcaagtggtataacggtggcataatgctctaaagttaattcattgcgttctaaaatacgcacctcttgctgatcaagttgagtaattaagccagtgtaagtagcacctgtattcacctcaaaagttgtaaagggttgcgtgtcagctacgttaatcagtaaatcatgcagattagtaaaatcccaggctaacactgtcttatttaattgctctaagttaaatgaatccttaacttgggtaatcatataatagcgtagattaggcgtatcgtcttcaatcttagctacttgatcttctttaataaagactattccacctaaattaccgccttgatcgactgattcaaaggtaatccagccatgatgttgcgtgataatgcggccaatatagtaagaatttgcatcaactaccgtaatacttgcatccccatctaagttatatttttcttgatcagccttaagcgtgatttgtacaagtttattcaatttttcgccccctcttttttcttccgtgaatttaattgtcgcctaatcattatttttctgcaagaaaaaagaagatggtttagccatcttctaatattgagttaattctgtagaattttggggctaacgaatattacttcttttgtgcagctgcctcagcttctgctgctgtgtttgaaggggttaacgaagtactgtttggatcaaaacgcacatcgcttgcttttacataaccatcagcaaattggacttcaccttgattactatagacagatttaccaactaagtgataaaacagttctgccttattttcacttggtacccagatgtaaagcaacttatttaccttgtatcttccaccttgttttctaacttgatcgcccttgaagtcaatcttgtttccgttagcatcatagatatcagttggcttaataaattgaattagtgattttttagtatgataataattttgaactggaatatctttagcagctttaacattgaaattataaatccaataatcagttcccttaatatgatagattgctaattcgttgtcatcgtcaccatctctaccagtatcagcacgtgtcccttgctctaaacgatccactgtaaacttatcaccttgttttgcgtattttcctgaaggctgaactgcatctttatcaggtacttcaacaaaaagagcagcacgtttatcagttacagtaacagtcgtttcttctgatttagttgtttgagacgaagaagaactagtgttgttatttgtattaacactaattacaggacctaaattataagacttaatgtactgtttattaggtccacctattctaaagtaatgctttccgttcttaaatttgtatgaaccgccataagtcgtgatagtttcacccttatacaatttccaacggttattgtaagaggttctgccagttgaggtacgataaatgtaagtattatgagtaatcttacgtgttacaccatcaatgttggtagcctttatgtattgatccttgccgcttactttatagtaaagcgagccgtcaatttttacagggttgctttcaacagtgacatattgataggcattgtattttacacctgtgctgttaccatccttgtcgtaagctaaagcagtatgcataactgctttagtcgtagcagcttgtacttcattagttgtattagtcaaaacagccaagggtgcaactgtcattaatgtagctgcagaaattaatgcaatcttatttttcttcatcataatcatccttttcaaatctctacactgctattatattctctaaagctaattaaagcattaaaaagaagcccattaagtgaagtggacttctacttttgatattttcttttaatttattttttcaatgccgttgcctcagcttctgctgctgtgtttgaaggggttaatgtcaaacctatattaacaaatttaacatcactagctttaacataggcatcattaccgacttcaatttgatcaacgttacctgtagcatagaacttagtaccaactaaatggtagaataattctgccttgttttcacttggtacccaaatgtatatgagtttatctactttcagatttccaccttgttttacaatttttgcgccattgtggttttgcatagtaccgtcagcattatacacatcagtatccttgacaaatttgatatagccataatgttcgtgatcataatcatgctttactaattttttatcggcagttacatcaatagctaaaagccaattgtctgtaccttttattctatacattccagcttgtgctgcagttgatggaaaatgatcagcaaacggagtaacttctagtttatctacaataaacttcgtaccagctttgagattctttttgattgctttaccttgattatcataaatatttacaccgtaagcattttttacggtaacagttgcttcctcggcattagtattagtagcgttgtttgattcattgctggttaaatttgatgcagtattagtactaataactgggcctaaattatatgatctaatatattgcttacgtggcccacctactctaaagtaacgtttaccgtttttaaatttatatgatccaccatatgtagttacggtttcacctttataaaatttccatttcttactgttggcagtcataccataaggtgtcctttgagtagaagtccggtatatataagcattatgagtaatctttcgggttacaccatcaatattagttactttgatatattcatctttatctgtaactttgtaatattgacttccattgatagttactagttttggatctacatgaacactaccataaacgtaatatttatgaccggtactatttccatctttatcataagctaatgcgttgtgcataatagtcttggttattgaagaatctgcttgtactgtatgagcgctagttgtagtactcaggataggtgccgttcccattaaagctactacagaaattaacatgattttattttttctcattattaaccaccctttgaaaatctctatacttcaattatcttactttgtataaacttagacaacaaaaatagcatcaaatcatattgatttgatgctattaaggctaaaatttacaaatttagtcccaagctaattcataaaccttatttgaaacagttttatttttaccgttaacattagcatggtatgcaacagttaagtaaccgtgattttcatcaataatttggatactttcaacttcactatgttcatctgaaatatctaatccaccaaatgcacttaagtttacattttcccattgagattgatcattacgtgcataaaacggaatttttacaatttccttgtgatagtatgaccatgaaccattacttaaacttggtgatttttgactagtaatataaatattaccagaattatcaagatcataaccttgtacagagtttaaaacagatccatacaaaccatatactgtaaaactagtttcacattgataatttcccatatttacgaaaccattatttccagcctcatctaatgcattattaatgacatttaggtcataaattgaaaagtggcctgttccattattctcaatagtagcaattaaaagcatactataatctggtgaaactgctacttcagcgcgttccatttcatcaccagagcattgatcttcaggattacctgcgcggttcaagtatgctaaacgtgggaattcagtatttgatgaagcatatgatttgtatctaatatctgctcgagcaatttgagaagcccatttattcttgtttttagtaccaacgaaccatttaccagatctacctgaatattcccaagtttgggtgtgtccagctgctgcacctactaaagtaagcacaggggttgtcacgttgccacggaagccacgcaatacatgtgtttctgtctggttatttcttaactgtaaaccataaacatactttgatcctacattacctttttgaactacagctctgtaacctgtattcatatcgaatctatctaaaattctaatatttgttgcatctaacataataaaacctccgaaaaatttaaaaactactacttatcctgagtttgctcattcatctgtttagccacttccgcaaagatgtcctgcacttcttgcctgttcagcttgaagccttttgcttcaaggctgttcactactgcgttgccaacacggttaatcttctgttcgtcagaaagattttctttgtcgtataagcgtacatagcttttcattaagctatctgcagtattgcggaattgctctaagcgtttattcttgaaatgaactctgctcaagatgccaatacctactacgctaattacccataacgccagagtaatcagctcaacgtaatcatgaatatccataattgaatgaatcacctctcttttgatcaaacgatccaagggggctaacgaatgtccattggacttcacctctgtttgataatgttcaacaagacactaatacacttgatttatattagtttttagactaatataaatgtataagaaataaccgaaagctggtaaatgttccgccaagaattttattaacttaggttgttttctttttcatatctcgttgacaatatttactataagttaattaactaattatgtcaataaaaaaagctaaaaaactattattttttttcgaacaagtattcttgaaaggcttggtatgattgagttagagcgcacaaaagaattagcaaaaaaatacaaaatgaatctccgtgaagtaaatgacaaggcaggtttaggtagaaattccatctataattggaagaatcaaagaccaggaattgatgcacttaatgcagtcgcagatgtactacatacgtcagccgattatttaagtggtaagacaaacaatcctagcccgtcacctaaaggtgatgaaactggtggtatttctattgatggtgaagtaccatatttctatcatggctacactattccagaagactacctgaacatagttcgtcaacttatggaacgtgatatcaaaaaaggacttattaaacgacatgacaacagcagatcagaataaacaagaactcatagactggttattagcctatgctaaaaaacgtgatattatggttgaattagttgaagtaaatccaacttacccatccatttctttaaagaactatagattcgctgtcattaatactaattggcatcatcaagaagaagtaccattttcaataggtcatgagattggtcacattatgctgactaatggtgaagtagattctcgtcaatatatcacttttacagaacagaattccgaagaaagtccagcagacatcttttcaataaagctaatctataattactcctgcaaaatgggtgattgcttcgaagatacaggtttatttatgcaagcatacgggataccaaatcgagtagctgatgcaactaaagagatatttaagcgagcagcttaaccatcaacttctatattgatttgattactaaaagttttagcattagtttttacactacttaaaatccaattaaacaaaaaatcgctactcaattgagtaacgattttttctatccatccagttcaacgccttgcaagtccttcatcttgctataaaccgcgccacgttgacttgaatcaaactccagaataagcatatctccgccgcgaattacggtttgaccatttggtatgatctcatctccatcgcggtgaattgttcttaccctagtatcaaccggccattgaacctcagaaatggttttatcaaccagtctactgctctcatagaccggcagagccattgtatcagcctgaccagtatagttagccttatggtcactactcttgtccatagcggctgctagaagcccgtagataggcttaccgccaagaagttcatcaactaataacgcaatgaaggccaccacagctaatggcatcaagtgaagtaaggaccctaccatctcagtaattaagataatcgccgtaaatggtgcacgaatgattgctgcaaaatatcctgccattgaaaaaatcactaggttaactactaaacgctgcggtaacaagcctaactgtaccatcatcagtccataagttgcaccaatcaaagcgcccattgtcaaaattggcaggaagataccactaggaagacctgaatcataagcaacaatggagaaaacaattctcatgacataatagaaggctagcatccctacaatgccccaacctgttttagtgattatattcggcaatgccagaattaaccgattacctggaccggtgattaatggccaaaagtaagcaatcgggattaatattgccaaaggaataagtccatgcagccaacgaggtaaaatggtgattttagcatagaccttctttaaactaaataaaccaactttatataaatgacccaataagcctaataaaatccctaagataagcaagtgccagtacaacgaaatcggaaatgaatagttatattgaattgctagggcgtgacgaatgccaaacaagtttgaaacgacaaagtttgaagcaattgcgccagctaaagcattcatccaaactaatggtgaaaagttatggaatacttcttctaagacaaacaaggcaccactcaaaggagcgccaaaagcggcagacaaaccacttgaagcccctgttgcaagcagaattctagtttttaatttgttctgcttgcatccctgagcaacaccttgaccaattgtcgagcccagctgcaatgatggtccttctggtcctaggaatagccctgtgccgataaccaagataccaccgattaatttccgccataaaattggaaaccattgtagtgatagcttcccttgcagttgcaattttacttctggaataccagaaccaccaacatggggatattgtttaacaaaataaccagcaattaccgctaccgcaataaagccaatgataatcgcaataaaccacaacggattctggtgcgctaattgaaacaagtataaccaaaaaccagatgtcttttcgattccaaatctaaataaaccaactactacgccggtacatattccgacaagtagtgcttggagcaacagtttaatattagttctgtttgcctcgtctttcattactttctccctcacaataaaaaaaacgtgtcacaaactattatacaacaaaaagccagctagaaatgttctaactgacttttttgtttcatgtgaaactaattatttttcttcataccattcggtgtggaagacgccttcacgatcatttctaaggtaagtgtgcgcaccgaagtagtcacgttggccttggatcatattagctggcaagtttggattaaagattgattccaaccagttaagagctgcgctcaaagttggagttggcacaccacacttagtagcaaattcaactgacttacgcaaagctggcaagttttccttcatcaagccgcggaaataatcgtcttggaataggttcattagcttgccgttcttgtcataggctttttcaatatccttaagcattgcggaacgaatgatacaacctgcttcccaatcttgagcaattgacttgtatcttaagtcccaatcataagcttcagcagccattgtcaattgttggaaaccttgagcataggcaacagcttgggctaattgcaatgatttttcgaatacgtcaaccatatcatcaggaatttcaccattgtattcaaacttagttggtttaacgcccttttcaattgtcaagtgtgcttgcttactcatgaaacgtgccattacagcctcggctaccaccgttacaggagcgccaagtgcaacaccatcttcgagcatccagttaccagtacctttgtatgaagcaacgttcaaaatgtgatcgattacgtgatctggcgttaaatcatctttttgtgccaaaacctttgaagtgatttcgctaagatatgcttctaccttaccatgattccatttatcaaaaatttctgacatttcatcatcgctcttgtgagcaacgtcacggagtaagttgtaaacttctgaaaattcctgcataataccgtattcgataccattgtgcaccattttgacatagtgaccagcaccttcaggtcccatgtagtagacacatggcttgccttcagtattcttagcggcaatagcttcaagaattggagcaacttccttataggctggttcatcaccacctggcatcaaagctggaccattcaaggcaccctcttcaccaccggaaacacccataccaataaaatgaatgccgtgcttttccatttcgtggaaacgacggttagtatcgtgataatttgagttaccaccatcgattaaaatatcgcctttatccaaaagcggcagcaatttttgcaaagtttggtccactggatcgcctgccataatttgaatcaaaatcttgcgtggcttttcaagtgagtttacgaactcttcccaggtgtagcaaggctttaatttatcatcttcatattttgcgaaagcatcaacttctggtttgtcgattgagaaaccggaaacggagaagccgtggtttctaacattcaaagcaaggttcttgcccataacagacaaaccgataacgccgaattgttgcatgtttattaattcctccattaatcaaagttcatcaagtattattatacgttctagcacgcaaaaaagcgaaaccaaaaggttccgctttttaaaatctagttaataatttttttgttattgggtaaaggtgtttcacacactgctcggtaatatttcctaggaaatattacttttattgatcaataccccaaagtaaaatgttaaatgctaatggtagtgttagcttggtaatgtatccatcctttttagcctgttttaaagatgctagaacaaatttacgttgttgacccgttagctttttggctactttaacagctaaattaaagtcatactcgttttttctaatagcatttttgataactatctttgcccacagaaataggttgagaatcggagtttacagttacaatgtagctccacttgctaagtcgaggaatatttttaattgttatagctttatcaaacttagctactgcagttgaattgctgttgtctgcagcgttggcagtgacagacgatgctgaaaataatgctgcaagtaaagcagtagcaagtaaactaattagagcttttttagatttcataatttagcatctttttacacatagtgcttattggctaataagcattaattcatatccaacactgtctattataagcatctgtattctatttactagccaacaaactattttatatttaaaatcgtatataaaatgaggctatttcccaggaaatattttcccatacaaaaaaagcgggacaaacgtctcgcttctttataattactcaaccaaattagtgttgtgaagcacctgaaaccgtatcaggagcaggatcctcttctggttctgattcttcatgttgagatgcacctgttgcagcgtcagcttctaagccgtacttttctgcaaagtaactgaatggcttcaagtcttcagcttgatacttcttgacaaaggctgggtcgtcaagtgagttcaactcagttgagtaaggaatttcgtgagtgtacttgacgtcgatcaacattggaccgtccatcttcttgaattcgtcgacagcatcttcgaattccttcttggtgcgaaccgttacacccttaacattcataccttcagcaacctttgcccagtcgttatcagggataataacaccagataatggttggtgagattcatcttcttgttctgcttgaatgtaacctagtgtttcgttagtaaatacaatattcaaaacatgcatgttgtaacgagccatagtaagaagttcttggttcatcatagcaaaaccaccgtcaccagctaattgccatacttcacggtctgggtaaacagttgctgcagtaagagcagctggagcaccataacccatagttgcgtgcaagcctgaagtagtccacttttgatcatcatgcaagttcaaaagacggcatgagtcaacgttaacgttaccaacatcaatagcaaagatggcgttgtcatcagccttcttgttgataacatcccagattggttcaggacgtacaggcatttcatctgagttcttaaagcttgcttgccatgcatcccagttctcacggtctgcaatagcagccttgtaaagtggtgattcgctacgttcttcaccagcgtcaataattgctctcaaagccttcttagcatctgcaagcattgaaacatcagttgagtgacgcttaccaaacttagctgaatcaacatcaatttggataaccttagcgttcttagggaaccataaaactgagaatggtgagttgttacctacccaaacaactaagtcagttgcgctttggacttcttgagcagccttaggtccgatacggccgatagtacccatgtatgctgggaatttgtcttctactacacccttgcctaagtatgatgacataataggggtcttgaacttttcagcaaattccttaacttcttcaccagcatcctttgcacctaaaccaatgtacatggttgggttcttagcttctttcaaaagcttaacagcttcttcaactgaagccttagttggtgctggataattgtctgctggatgagcatccttgtttacacggaaggtgtcatcaatcttttgccaaccgtagtccttaggaataatgataactgcaggaccctttcttgcgtaggcttgacggatagcttcatcagttaaaattggaatttgttcagcggtcttagcttggcggcaccaaacactagcgttcaagaaccacttgtcttcatcaaaagcttggaagaagtcaatatcttgacggctagttggaacgttagcaacaattgctaccattggagtcttgtcaaacttagcatcatacaaaccattgaataagtgggcagcaccaggaccagctgaaccgaaacatacacccaacttaccagttaacttatattctgcagaagcagctaaagcaccagcttcttcgtgacgtacttcaataaatttcatcttatctctaaagtcatagatagcgttcatacttgagtcgaatgaaccacctgggaaaccgtagatatgatcaattccccaatcgtaaataactttaagcattgcatcagaaccattaatttttgtcatataagtgcatctccttaacttttgttctttcataatgtattaaaacactttttttcacatttgcaaaccgataaaatcaccgttattacgcaaatgaaaacgcttttgtaataataatcacttcacaagctttaccaaattcaatatctcaaaaagctgaatggtagcgttttatattgtgatttgatgaacattattatactaaatttcacttattttatgtatattcattgttacttatagtaaaaatttaagaaaaaattttttacaatttatttcatagctatccaatttagaaaaacgttattttataattttgcgcataaaaataacgtagaatactattcctacgctatttttgtgctattctactttttcactctagagtaacgcccatttttaatgtaaacactcaagattgccaagtcagctgggttaactcctgaaattcgttctgcttgagctaaagtttcaggacgaattttttcaaatttttgccgtgcctcagtagctaaaccttcgatttggtcataatcaatatctgctgggatttttttggcttcttgtctctttaagcgagcaattctggtttcttctttcttgatatagccagcatacttgataccaatctcaacttgttctttaacgtaacgatcgcctggaactttttcaccagttaaccgttcaatatcagcaatagtaacattagggcgacgcaagaaaacatcggccttaacaccggccttcattggttcctgaccaatactttgcaaaaattcctgcacctcatcagttaaatgaaccgtaatttcatgcagtctcgtctttgcatcttcaatcgcatgcttcttttcttcaaatcgtgcgaagcgttcgtcagaaattaagcccagatcatgaccatattcagtcaaacgcaagtctgcgttatcattgcgtaaaatcaaacgatattctgctctactagtaagtagacgatatggttcattcgtccctttggttaccaagtcatcgattaacacgccaatgtaagcatcgttacggcctaaggtaaatcctggcttatcttgagcagataatgccgcattaattcctgcaattaaaccttgaccagctgcttcttcataacctgatgttccattcatctggcctgcagtaaataaatgctttacgtttttggtttccaaagtatgcttcaattgccatggttcaaccacatcgtattcaattgcatatcctggtcgcatcatttccgcatgttctaatcccgcaacagaatgaatcatctttaattgaatttcttctggcattgaagttgaaaagtcgcctacataaacttccttggtagtctttccttctggttcaaggaaaatttggtggcgatccttatctgcaaagcggacaactttgtcttcaattgaaggacaataacgtgggcctacacccttgataattccagagaacatcggtgcacggtcaagattgtttctaataatcgtgtgtgtggttggattagtataagtcatccaacaagaaatttgtttttgtaaataatcttcatcacgactttcatatgaaaagtgccgtgggattttatcaccaggttcttcctcagttttagaatagtcaattgtattgccgttaacacgtggaggagtaccggttttaaaacgacgcagcttaaaacctaacttttctagattttccgacagcttaattgaaggagtagtgttatttggacctgaagaataagtcaattccccaataataattttaccgcgagccgctgtacctgtagtcaaaacaacgcttttagcatgatacttcgcaccagtattggtaatcacacctttgcagacgccatcttcaactaccaattcatccacgatagcctgacgcaaggtcaagttgggcgtattttcgatcgtatccttcatgtgttcatgatattgccacttatcagcttgagcacgtagcgcacgcacagctggccccttacccgtatttaacatccgcatttggatataggtagcatcaatgttctttcccatttgaccacctaaagcatcaatctcacggacaactgtccctttagctggtccaccaacagatggattacatggcataaaggccaccatatccaaaccaatcgtaaccagcaaagttttttgtcccatgtgggcacttgccaacgcagcttcacatccagcatgcccagcaccgacaacgattacatcatattcatttgaatcatatgttttaaccattttcatcctactttcctaaacagaattgactaaataattgcgtgattaattcatctggggcactttcaccagtgatttcacctaaagtatcccaagcaccagtaaaatcaatttgtgcaatatcaacagggacgccatcttcaactgcttgaattacatcttccaattctttcttagccttatgcaataaggaagcttggcgttgattggttaccataatttgatcattagaattttcaatcccagcaaaaaatagcttattaatcaattcttcaagcgcatctaagttttgttctttcaaaatcgaagttgaaataacatcactacccgttagtttctccatctcagtagttgttattttttgacctaaatccgacttatttaagatcacgattcgcttcttgtcctttgttgcttcaattaaggcttgatcttcagctgttaatgcttgactagcatcgattaacaacaagaccagatctgctcgctccaaggccttttttgatctttctacaccaattttttccaccttatcttcagtgtggtggattccagcagtatcaattagctctagcggtactccttttacagacacatattcttctaacgtatcacgcgttgttccagccacatcggtcacaatcgctttgtcgctttgagtcagataattcaataaagaagactttcccacattaggacgaccaacaattgcagtagccaaaccattgcgcaagatttttccttcttgtgctgtcttcaataagcgattaattttatcaattactgatctagatgtgtctgccatctgttttgcggtaacagtatctgcatcatactctggataatcgatattaacctcaacgttagccaaagtattcagaatttcctgccgcattgcctgaatcttgtgtaacaatccaccagctaattgaccaacagccacttgtcgtgccttatccgtcttggcccgaacgatatccatcacactctcagcttgagttaagtcaattcgtccgttcacaaaagcacgtttagtaaattcaccaggatcagccattcgcgcaccgtgactcagcaacaattgtaaaatatgattagttaccacgattccgccatggcaattgatttctacaatatcttcacgtgtaaaggtcttgggcgcacgcagcactgtcaccattgcttcatcaatcgttttcccagtatccggatcgataatatgaccatagtgaatagtatgtgtcggcaccttgcttagatcttcgcctttaaaaacctcatcagcaatcttaattgcatcctcaccagacattcttacgattgaaattccgccttcaccgatgggggttgaaattgctgcaatagtatcgaactctgtcaaagtttgagccataattcttcccttttctcaataaaaaaagcgcattataccaccacgaataaccatgatggataaagcactttgactactttatctaaaaatcattttagactaatattcttttatttctttttgcgtcctaaacgcttgtaagcccttcttagtttacgtttgcgttcacgctcagcctcagcctttgcttcttgctctcttctatatttaatagggttttgcaagataaaggtttgaagcgcctggaacaagttggaaattacccagtaaagtgtaatagctgactggaagtttaaggccatcacaccaaccatgatagacattccgtacatcattactttggtcattccattttgcgatgattttggcgtcgataattgactaatatacgtcgataagaacgtaaagatcattgctaaaataggcatgatgtaatatggatcgggcttgcttaaatccatccataagaagcgcccagtttgtaactgcggtgtacgtaaaatcgcaccatacagtgcatacataactggcaactggatcaggacaggcaaacatccagtataaggatttacgcctgcttctttataaagcttgttagtttcttgttgtaataatgttcttgattcagtgtcacgtcctggatatttcttacgcaactcattaatttgtggttggatgctttgcatcttagtagtacttcgaattgaaatagcattcaaaggtactaagatgacacgaacaatgacggtgaagacaataattgcccagccataactgttccccattaacttagctagccacaaaataaaagctgacatgtaataaacgatccaacggtcccaccaattaccacttgtatgtgagattggcgttgcttgaccatttgctcccgtagtagcacatcctgtcaatacaacagcaagtattgctactgctaagactgcaagaagacgtttgacatttctcttggtcagaatgtccttcaatctatttttcctcaactttatctggcatttcttcaataatatgagctaacgataatgcgtgaagcaagtttttacgcacctgagccatattaaaatcgcgagcataaggtcgcgtaatgactaaaaaatcaacatgcggattaatctgcaatttttcttcatcaatcacggcccgaatataacgcttgagtcgattacgtgcgactgcggtatgaccaacctttttgcccacagaaattcctactcgaaagtgtttattttctgttttttctaccttataaatgacaaaagctcggttagcgactgagtcgccagattcgaaaacttgctggaaatctttttcagattttactcgataagactttctcaaaacgtttcattccactctagtagactaaaaaaaccactgggattcagtggtttaagcagataagacttttctaccttttgcacggcgtcttgctaaaaccttacggccatttgatgtgctcatacgcttcataaaaccgtgaacacgtgaacggtgacgcttcttaggttggtaagttctcttagttgtcatattaaactgcacctccataaatttttgtgccaattgcacaatttcttattaaggatagcacgaaaagccataaaaaccaagtattttaagaaaaaaagactcctgaattgtcaaattaagtgcaacagttaggctatgaaggaacgtattgcttgaagagttcttctgctgtgtgatattggaggattcgacgatgtttgcggttaatggcatcagttgcctgttgaacataagcagctgacttatctttcatgcttttgcccttagggaagaattgacgcagaagtccattgcagttctcatttgtgcctctttcccaaggagaatatggatgagcaaagtagatctgacatcctttgattttggtcatatccgcaaactcagaaccattgtcaaacgtaattgatttaaaccaattaggatgtctgtcaatctccttttgaagcagtctttgacaagtactggcccgatagtcaggaattttgataacaacctcaaaacgagtggttctttcagtcagtgtcattaaggcaggttgatttttacgtctgacgcctttaaccaaatcgccttcccagtgcaggggaacttttctgttttcaacttctttaggccgctgttcaatcgaattgccaagattctttttatgcggagcatggccaccatgactatgatggcgtttgtttctgcgtcttttaagcttcattggcaggtcgatattgcttatatccagcaatccttgatcaatataacgatagacagtgggcgtgctaggacatggataatttggcataatcctgtgaaattcaccaacgaattcatcaatgctggtggcatcaaatttggctttaaagcgtctgcttagcattctgaaaaagacggcatagtgttgcagtggattacacttatagcagtttctgcgacgcttctcataataaatctgtgcagtatcagcgtaatagtgctcatacaacaaatagctgctgtctctttgcaggacactgcctcgtctaatttcacggctgatagttgatttatgacagcctacttcttgagcgatagcattgcaggaggttatgccagaatcaagcagagcttgaatttgtccacgttgttcgctgttcaattgatgataatgcttggaaatgctagaatttgagttggtcatgaagatcttcctttcttgatttttggtcacttcaagtttaggtcttcatggcctttttgtttaacacttagtgttgcacttcaattttaaatccgggagaaaaaaagacttttaaatcccgtgaatattttctaaaaattgattgtttttcatgtggataaaaaataaaatatttttcttacgtataatttccacaagataattcccaacgttttccacaactcacatggtgttaaaaacttaattcacaccatgtggataacgcatatggtattttacctcaagtattgatagaatagtatccataattcacagctgtactgtgcataaattaacagttttgctcttatcatgtcaaaatgtacatatcactttaatagttatcaacaggctgtgtactttgttgatttctttttcacctgtggaaaaccagttaagtaaatggtaaaataaatttgctttttactaactgggggaatgtaca
